(19) United States
(12) Patent Application Publication
(10) Pub. No.: US 2010/0136041 A1
(43) Pub. Date: Jun. 3, 2010

(54) COMBINATION GAS VACCINES AND THERAPEUTICS

(75) Inventors: Guido GRANDI, Siena (IT); Immaculada MARGARIT Y ROS, Siena (IT); Sabrina CAPO, Siena (IT); Giuliano BENSI, Siena (IT); Andrea Guido Oreste MANETTI, Siena (IT)

Correspondence Address: NOVARTIS VACCINES AND DIAGNOSTICS INC., INTELLECTUAL PROPERTY- X100B, P.O. BOX 8097, Emeryville, CA, 94662-8097, US

(73) Assignee: NOVARTIS AG, Basel (CH)

(21) Appl. No.: 12/561,619

(22) Filed: Sep. 17, 2009

Related U.S. Application Data
(60) Provisional application No. 61/097,551, filed on Sep. 17, 2008.

(51) Int. Cl. A61K 39/02; A61K 38/16; C12N 1/21

(52) U.S. Cl. 424/190.1; 514/12; 435/252.3

(57) ABSTRACT

Compositions useful for reducing the risk of, preventing, and/or treating S. pyogenes (GAS) infections which comprise combinations of GAS antigens, nucleic acid molecules encoding the antigens, or antibodies which specifically bind to the antigens.

[0001] This application incorporates by reference and claims the benefit of Ser. No. 61/097,551 filed on Sep. 17, 2008.

[0002] This application incorporates by reference the contents of a 1.2 MB file created Sep. 16, 2009 and named “52611_US_NP_sequencelisting.txt,” which is the sequence listing for this application.

### FIELD OF THE INVENTION

[0003] The invention relates to the fields of immunology and vaccinology.

### BACKGROUND OF THE INVENTION

[0004] Group A streptococcus (“GAS,” S. pyogenes) is a frequent human pathogen, estimated to be present in between 5-15% of normal individuals without signs of disease. An acute infection occurs, however, when host defenses are compromised, when the organism is able to exert its virulence, or when the organism is introduced to vulnerable tissues or hosts. Related diseases include puerperal fever, scarlet fever, erysipelas, pharyngitis, impetigo, necrotizing fasciitis, myositis, and streptococcal toxic shock syndrome.

[0005] Efforts to develop a prophylactic vaccine for use against GAS have been ongoing for many decades. Currently, however, there are no GAS vaccines available to the public. There is a need in the art for such vaccines.

### BRIEF DESCRIPTION OF THE DRAWINGS

[0006] FIG. 1. Graph showing protective capacity of GAS antigen combinations in a subcutaneous challenge mouse model. “GAS57,” Spy0416; “GAS25,” Spy0167; “GAS40,” Spy0269 (SEQ ID NO:177); “dGAS57,” Spy0167 mutant D151A/S617A (SEQ ID NO:198); “dGAS25,” Spy0167 mutant P427L/W535F (SEQ ID NO:125).

[0007] FIG. 2. Photomicrograph of SDS-polyacrylamide gels demonstrating that Spy0416 point mutant D151A has lost the ability to cleave IL-8. “57,” Spy0416 (GAS57).

[0008] FIG. 3. Graph showing the results of an ELISA assay demonstrating that Spy0416 point mutant D151A has lost the ability to cleave IL-8.

[0009] FIGS. 4A-B. Photomicrographs of SDS-polyacrylamide gels demonstrating that Spy0416 single mutants D151A and S617A and the mutant D151A+S617A have lost Spy0416 proteolytic activity.

[0010] FIG. 5. Graph showing the results of an ELISA assay demonstrating that single mutants D151A and S617A and Spy0416 mutant D151A+S617A have lost Spy0416 (“57”) proteolytic activity.

[0011] FIG. 6. Photomicrograph of an SDS-polyacrylamide gel demonstrating that wild-type Spy0416 is post-translationally modified into two polypeptide fragments of 150.5 kDa and 23.4 kDa.

[0012] FIG. 7. Photomicrograph of an SDS-polyacrylamide gel demonstrating that Spy0416 mutants D151A, S617A, and D151A+S617A are not post-translationally modified into two polypeptide fragments of 150.5 kDa and 23.4 kDa compared to wild-type (black arrows). A major band of 174 kDa corresponding to unprocessed protein is instead present in the lanes corresponding to inactive mutant strains (grey arrow). “57,” Spy0416.

[0013] FIGS. 8A-B. ELISA assay results demonstrating dose-dependent inhibition of Spy0416-mediated IL-8 cleavage by polyclonal antisera against Spy0416 (“57”) in two different experimental conditions. FIG. 8A, 8 hour incubation, 0.1 μg/ml of Spy0416. FIG. 8B, 24 hour incubation, 0.05 μg/ml of Spy0416.

[0014] FIG. 9. Graph showing results of hemolytic assay using E. coli extracts containing wild-type Spy0167 and Spy0167 mutant P427L.

[0015] FIG. 10. Photomicrograph of SDS-polyacrylamide gel showing purified Spy0167 mutant P427L.

[0016] FIG. 11. Graph showing results of hemolytic assay using purified wild-type Spy0167 and Spy0167 mutant P427L.

[0017] FIG. 12. Photomicrograph of SDS-polyacrylamide gel of E. coli lysate supernatants. Lane A, E. coli negative control; lane B, rSpy0167 wild-type, without tag; lane C, rSpy0167 P427L, without tag; and lane D, purified rSpy0167 wild-type, without tag (5 mg).

[0018] FIG. 13. Graph demonstrating that under the same conditions, Spy0167 mutant P427L is 1000 times less hemolytic than wild-type Spy0167.

[0019] FIG. 14. Graph demonstrating effects of cholesterol on hemolysis by wild-type Spy0167 and Spy0167 mutant P427L.

[0020] FIG. 15. Photomicrographs of SDS-PAGE analysis of total tag-less proteins in cell extracts. FIG. 15A, expression of Spy0167 wild-type and P427L tag-less proteins; FIG. 15B, expression of Spy0167 P427L+W535, P427L+C530G, and P427L+C530G+W535F tag-less proteins.

[0021] FIG. 16. Photomicrograph of SDS-PAGE analysis of total His-tagged proteins in cell extracts.

[0022] FIG. 17. Photomicrograph of SDS-PAGE analysis of purified His-tagged proteins.

[0023] FIG. 18. Photomicrographs of SDS-PAGE analysis of purified tag-less proteins. FIG. 18A, Lanes: A, Spy0167 wild-type tag-less; B, Spy0167 P427L tag-less; molecular weight markers (116-66.2-45-35-25-18.4-14.4); black arrow indicates Spy0167 protein purified from mutants and wild-type clones. FIG. 18B, lane A, Spy0167 Wild Type tag-less (3 μg), lane B, Spy0167 P427L-W535F tag-less (3 μg); molecular weight markers (116-66.2-45-35-25-18.4-14.4); black arrow indicates Spy0167 protein purified from mutants and wild-type clones.

[0024] FIG. 19. Photomicrograph of SDS-PAGE analysis of purified tag-less Spy0167 (“GAS25”) wild-type protein. Samples of different purification lots of wild-type Spy0167 were analyzed under reducing and non-reducing conditions.

[0025] FIG. 20. Graph showing results of hemolysis tests of His-tagged Spy0167 mutants.

[0026] FIG. 21. Graph showing inhibition of Spy0167-induced hemolytic activity by anti-Spy0167 antiserum.

[0027] FIG. 22. Graph showing titration of anti-Spy0167 antiserum inhibition of Spy0167 hemolysis.

[0028] FIG. 23. Graph showing Spy0167 hemolytic activity titration.

[0029] FIG. 24. Graph showing titration of hemolytic activity of wild-type Spy0167, chemically detoxified wild-type Spy0167, and Spy0167 mutants (P427L; P427L+W535F).

[0030] FIG. 25. Graph showing titration of hemolytic activity of wild-type Spy0167 and Spy0167 mutants (P427L; P427L+W535F).

[0031] FIG. 26. Graph showing titration of hemolytic activity of wild-type Spy0167 and chemically detoxified wild-type Spy0167.

[0032] FIG. 27. Graph showing dilution of antiserum against Spy0167 (“gas25”) mutant P427L+W535F required to obtain 50% reduction of Spy0167 hemolytic activity (50 ng/ml Spy0167).

[0033] FIG. 28. Graph showing dilution of antiserum against Spy0167 (“gas25”) mutant P427L+W535F required to obtain 50% reduction of Spy0167 hemolytic activity (100 ng/ml Spy0167).

[0034] FIG. 29. Titration curve showing that hemolysis inhibition assays were performed with toxin concentrations which allow 100% haemolysis.

[0035] FIG. 31A-GG. Alignments of Spy0416 (“gas57”) antigens from different strains/M types. The catalytic triad (D, H, S) is in bold black characters. FIG. 31A, amino acids 1-50 (amino acid numbers at the top of each of FIGS. 10A-GG refers to the amino acid sequence of Spy0416M1_SF370, SEQ ID NO:1); FIG. 31B, amino acids 51-100; FIG. 31C, amino acids 101-150; FIG. 31D, amino acids 151-200; FIG. 31E, amino acids 201-250; FIG. 31F, amino acids 251-300; FIG. 31G, amino acids 301-350; FIG. 31H, amino acids 351-400, FIG. 31I, amino acids 401-450; FIG. 31J, amino acids 451-500; FIG. 31K, amino acids 501-550; FIG. 31L, amino acids 551-600; FIG. 31M, amino acids 601-650; FIG. 31N, amino acids 651-700; FIG. 31O, amino acids 701-750; FIG. 31P, amino acids 751-800; FIG. 31Q, amino acids 801-850; FIG. 31R, amino acids 851-900; FIG. 31S, amino acids 901-950; FIG. 31T, amino acids 951-1000; FIG. 31U, amino acids 1001-1050; FIG. 31V, amino acids 1051-1100; FIG. 31W, amino acids 1101-1150; FIG. 31X, amino acids 1151-1200; FIG. 31Y, amino acids 1201-1250; FIG. 31Z, amino acids 1251-1300; FIG. 31AA, amino acids 1301-1350; FIG. 31BB, amino acids 1351-1400; FIG. 31CC, amino acids 1401-1450; FIG. 31DD, amino acids 1451-1500; FIG. 31EE, amino acids 1501-1550; FIG. 31FF, amino acids 1551-1600; FIG. 31GG, amino acids 1601-1650. M1_SF370, SEQ ID NO:1; M1_{—}31075, SEQ ID NO:2; M1_{—}31237, SEQ ID NO:3; M1_{—}3348, SEQ ID NO:4; M2_{—}34585, SEQ ID NO:5; M3,1_{—}21398, SEQ ID NO:6; M44-61_{—}20839, SEQ ID NO:7; M6,31_{—}20022, SEQ ID NO:8; M11_{—}20648, SEQ ID NO:9; M23_{—}2071, SEQ ID NO:10; M18,3_{—}40128, SEQ ID NO:11; M4_{—}10092, SEQ ID NO:12; M4_{—}30968, SEQ ID NO:13; M6,31_{—}22692, SEQ ID NO:14; M68,5_{—}22814, SEQ ID NO:15; M68_{—}23623, SEQ ID NO:16; M2_{—}10064, SEQ ID NO:17; M2_{—}10065, SEQ ID NO:18; M77_{—}10251, SEQ ID NO:19; M77_{—}10527, SEQ ID NO:20; M77_{—}20696, SEQ ID NO:21; M89_{—}21915, SEQ ID NO:22; M89_{—}23717, SEQ ID NO:23; M94_{—}10134, SEQ ID NO:24; M28_{—}10164, SEQ ID NO:25; M28_{—}10218, SEQ ID NO:26; M29_{—}10266, SEQ ID NO:27; M28_{—}10299, SEQ ID NO:28; M28_{—}30176, SEQ ID NO:29; M28_{—}30574, SEQ ID NO:30; M6,9_{—}21802, SEQ ID NO:31; M75_{—}10012, SEQ ID NO:32; M75_{—}20671, SEQ ID NO:33; M75_{—}30603, SEQ ID NO:34; M75_{—}30207, SEQ ID NO:35; M22_{—}20641, SEQ ID NO:36; M22_{—}23465, SEQ ID NO:37; M3,1_{—}30610, SEQ ID NO:38; M3,1_{—}40603, SEQ ID NO:39; M3,28_{—}24214, SEQ ID NO:40; M3,34_{—}10307, SEQ ID NO:41; M4_{—}40427, SEQ ID NO:42; M3_{—}2721, SEQ ID NO:43; M12_{—}10296, SEQ ID NO:44; M12_{—}10035, SEQ ID NO:45; M12_{—}20069, SEQ ID NO:46; M12_{—}22432, SEQ ID NO:47; M4_{—}40499, SEQ ID NO:48; and M6,1_{—}21259, SEQ ID NO:49.

[0036] FIGS. 32A-R. Alignments of Spy0269 (“gas40”) antigens from different strains/M types. FIG. 32A, amino acids 1-50 (amino acid numbers at the top of each of FIGS. 10A-GG refers to the amino acid sequence of Spy0269M1_SF370, SEQ ID NO:50); FIG. 32B, amino acids 51-100; FIG. 32C, amino acids 101-150; FIG. 32D, amino acids 151-200; FIG. 32E, amino acids 201-250; FIG. 32F, amino acids 251-300; FIG. 32G, amino acids 301-350; FIG. 32H, amino acids 351-400, FIG. 32I, amino acids 401-450; FIG. 32J, amino acids 451-500; FIG. 32K, amino acids 501-550; FIG. 32L, amino acids 551-600; FIG. 32M, amino acids 601-650; FIG. 32N, amino acids 651-700; FIG. 32O, amino acids 701-750; FIG. 32P, amino acids 751-800; FIG. 32Q, amino acids 801-850; FIG. 32R, amino acids 851-874. M1_SF370, SEQ ID NO:50; clinicalisolate_{—}40s88, SEQ ID NO:51; M11_{—}2727, SEQ ID NO:52; M22_{—}20641, SEQ ID NO:53; M22_{—}23465, SEQ ID NO:54; M22_{—}23621, SEQ ID NO:55; M3.1_{—}30610, SEQ ID NO:56; M3.1_{—}40603, SEQ ID NO:57; M3.34_{—}10307, SEQ ID NO:58; M3_MGAS315, SEQ ID NO:59; M4_{—}40427, SEQ ID NO:60; M3_{—}2721, SEQ ID NO:61; M3_{—}3040, SEQ ID NO:62; M3_{—}3135, SEQ ID NO:63; M12_{—}10035, SEQ ID NO:64; M12_{—}22432, SEQ ID NO:65; M4_{—}40499, SEQ ID NO:66; M78_{—}3789, SEQ ID NO:67; M89_{—}10070, SEQ ID NO:68; M89_{—}21915, SEQ ID NO:69; M89_{—}23717, SEQ ID NO:70; M89_{—}5476, SEQ ID NO:71; M23_DSM2071, SEQ ID NO:72; M4_{—}2722, SEQ ID NO:73; M4_{—}10092, SEQ ID NO:74; M4_{—}30968, SEQ ID NO:75; M4_{—}2634, SEQ ID NO:76; M28_{—}10164, SEQ ID NO:77; M28_{—}10218, SEQ ID NO:78; M28_{—}10266, SEQ ID NO:79; M28_{—}10299, SEQ ID NO:80; M28_{—}30176, SEQ ID NO:81; M28_{—}4436, SEQ ID NO:82; M8_{—}2725, SEQ ID NO:83; M44_{—}3776, SEQ ID NO:84; M6_{—}2724, SEQ ID NO:85; M6_{—}2894, SEQ ID NO:86; M6_{—}3650, SEQ ID NO:87; M6_{—}5529, SEQ ID NO:88; M5, SEQ ID NO:89; M77_{—}4959, SEQ ID NO:90; M2_{—}10064, SEQ ID NO:91; M2_{—}10065, SEQ ID NO:92; M75_{—}5531, SEQ ID NO:93; M50_{—}4538, SEQ ID NO:94; M62_{—}5455, SEQ ID NO:95; M44_{—}5481, SEQ ID NO:96; M5_{—}4883, SEQ ID NO:97; M9?_{—}2720, SEQ ID NO:98; M2_{—}2726, SEQ ID NO:99; M12_{—}20296, SEQ ID NO:100; M1_{—}2580, SEQ ID NO:101; M1_{—}2913, SEQ ID NO:102; M1_{—}3280, SEQ ID NO:103; M1_{—}3348, SEQ ID NO:104; M78_{—}3789, SEQ ID NO:105; M?_{—}2719, SEQ ID NO:106.

[0037] FIG. 33A-C. Alignments of Spy0167 (“gas25”) antigens from different strains/M types. FIG. 33A, amino acids 1-150 (amino acid numbers at the top of each of FIGS. 10A-GG refers to the amino acid sequence of Spy0167M1_SF370, SEQ ID NO:107); FIG. 33B, amino acids 151-300; FIG. 33C, amino acids 301-500. M12_{—}2096, SEQ ID NO:108; M12_{—}9429, SEQ ID NO:109; M1_{—}5005, SEQ ID NO:110; M1_{—}3348, SEQ ID NO:111; M2_{—}10270, SEQ ID NO:112; M28_{—}6180, SEQ ID NO:13; M6_{—}10394, SEQ ID NO:114; M18_{—}8232, SEQ ID NO:115; M5_Manfredo, SEQ ID NO:116; M3_{—}315, SEQ ID NO:117; M3_SSI, SEQ ID NO:119; M4_{—}10750, SEQ ID NO:119.

[0038] FIG. 34. Graph showing results of whole blood bactericidal assays demonstrating that anti-glycoconjugate (GC) antibodies mediate killing of S. pyogenes.

[0039] FIG. 35. Graph showing results of whole blood bactericidal assays demonstrating that the combination of anti-glycoconjugate (GC) antibodies and antibodies generated against GAS antigen combinations enhance killing of S. pyogenes. “Freund,” Freund's adjuvant; “M1,” S. pyogenes M1 protein; “COMBO,” Spy0416 mutant D151A/S617A , Spy0167 mutant P427L/W535F5, and wild-type Spy0269; “GC,” GAS polysaccharide antigen conjugated to CRM197.

[0040] FIGS. 36A-D. Graphs showing results of cellular toxicity assays comparing various antigens with positive (tumor necrosis factor α, TNF-α) and negative (NT, not treated) controls. FIG. 36A, Spy0269 (GAS40, SEQ ID NO:177); FIG. 36B, Spy0416 (GAS57) and GAS57 mutant D151A/S617A (GAS57 DM, SEQ ID NO:198); FIG. 36C, Spy0167 (GAS25) and GAS25 mutant P427L/W535F (GAS25 DM, SEQ ID NO:125); FIG. 36D, glycoconjugate (GC).

[0041] FIGS. 37A-D. Graphs demonstrating validation of ELISA assay. FIG. 37A, Spy0167 (GAS25); FIG. 37B, Spy0269 (GAS40); FIG. 37C, Spy0416 (GAS57); FIG. 37D, glycoconjugate (GC).

[0042] FIGS. 38A-F. Graphs showing results of ELISA assays testing doses of individual antigens. FIGS. 38A, 38D, Spy0167 (GAS25) (two experiments); FIGS. 38B, 38E, Spy0416 (GAS57) (two experiments); FIGS. 38C, F, Spy0269 (GAS40) (two experiments). “GMT,” geometric mean titers.

[0043] FIG. 39. Graph showing results of ELISA and challenge assays testing combinations of Spy0416 mutant D151A/S617A (GAS57), wild-type Spy0269 (GAS40), and dose ranges of Spy0167 mutant P427L/W535F (GAS25) in alum.

[0044] FIG. 40. Analysis of LogNormal model adopted as first approximation of mean survival time (MST; Mu) analysis, demonstrating that Mu decreases with decreasing doses of Spy0167 (GAS25).

[0045] FIGS. 41A-B. Bar graphs demonstrating that antibodies to Spy0419 and Spy0167 block toxic activity. FIG. 41A, Spy0419 (GAS57). FIG. 41B, Spy0167 (GAS25). The titer is defined as the dilution factor required to neutralize 50% of maximum hemolysis.

### DETAILED DESCRIPTION OF THE INVENTION

[0046] The invention provides multi-component compositions which are useful for treating, reducing the risk of, and/or preventing S. pyogenes infections. In some embodiments compositions of the invention are vaccine compositions which provide effective prophylaxis against pharyngitis caused by S. pyogenes infections in children.

[0047] Compositions of the invention are useful for preventing and/or treating S. pyogenes infections. Compositions of the invention comprise combinations of GAS antigens, combinations of nucleic acid molecules encoding the GAS antigens, or combinations of antibodies which specifically bind to the GAS antigens. Compositions of the invention comprise combinations of two or more GAS antigens, combinations of one or more nucleic acids molecules encoding the GAS antigens, or combinations of antibodies which specifically bind to the GAS antigens. The GAS antigens are GAS protein antigens. “GAS protein antigen”, unless otherwise defined encompasses a full-length GAS protein as well as fragments, fusions and mutants of the GAS protein as described below. Some compositions further comprise a Group A polysaccharide antigen as defined below. The invention also includes compositions comprising mixtures of combinations of GAS antigens, combinations of nucleic acid molecules encoding the GAS antigens, and combinations of antibodies which specifically bind to the GAS antigens.

[0048] Compositions of the invention preferably have one or more of the following properties:
[0049] confer statistically significant protection against one or more S. pyogenes strains (e.g., M1 3348, M12 EMS, M23 2071, M6 S43);
[0050] elicit antibodies which mediate in vitro bacterial killing (opsonophagocytic killing);
[0051] elicit antibodies which inactivate streptolysin O hemolytic activity;
[0052] elicit antibodies which block Spy0416 protease activity; and/or
[0053] elicit antibodies which prevent cell adhesion and/or cell division.

[0054] As described in the Examples below, compositions of the invention provide protection against different mouse-adapted S. pyogenes strains in lethal challenge models; elicit functional antibodies which neutralize potent toxins expressed by a majority of S. pyogenes strains; and mediate bacterial killing in vitro.

[0055] Some compositions of the invention comprise a combination of three or more different

[0056] GAS antigens selected from Spy0167 (also referred to as streptolysin O, Spy0167, or “GAS25”); Spy0269 (also referred to as “GAS40”); Spy0416 (also referred to as “GAS57”); Spy0714 (also referred to as “GAS67”); Spy1390 (also referred to as “GAS89”); Spy2000 (also referred to as “GAS100”); a mutant Spy0167 protein as defined below; and a mutant Spy0416 as defined below.

[0057] In other embodiments compositions of the invention comprise only two GAS antigens, although the compositions may comprise antigens from other organisms as well as other components, as described below. Some compositions comprise as the two GAS antigens Spy0167 and a second GAS antigen selected from the group consisting of Spy0269; Spy0416; a mutant Spy0167 protein as described below; a mutant Spy0416 protein as described below; Spy0714; Spy1390; and Spy2000.

[0058] Other compositions comprise as the two GAS antigens Spy0269 and a second GAS antigen selected from the group consisting of Spy0167, the mutant Spy0167 protein, the mutant Spy0416 protein, Spy0714, Spy1390, and Spy2000.

[0059] Some compositions comprise as the two GAS antigens Spy0416 and a second GAS antigen selected from the group consisting of Spy0167, the mutant Spy0167 protein, the mutant Spy0416 protein, Spy0714, Spy1390, and Spy2000.

[0060] Other compositions comprise as the two GAS antigens the mutant Spy0167 protein and a second GAS antigen selected from the group consisting of Spy0167, Spy0269, Spy0416, the mutant Spy0416 protein, Spy0714, Spy1390, and Spy2000.

[0061] Other compositions comprise as the two GAS antigens the mutant Spy0416 protein and a second GAS antigen selected from the group consisting of Spy0167, Spy0269, Spy0416, the mutant Spy0167 protein, Spy0714, Spy1390, and Spy2000.

[0062] Some compositions comprise as the two GAS antigens Spy0714 and a second GAS antigen selected from the group consisting of Spy0167, Spy0269, Spy0416, the mutant Spy0167 protein, the mutant Spy0416 protein, Spy1390, and Spy2000.

[0063] Some compositions comprise as the two GAS antigens Spy1390 and a second GAS antigen selected from the group consisting of Spy0167, Spy0269, Spy0416, the mutant Spy0167 protein, the mutant Spy0416 protein, Spy0714, and Spy2000.

[0064] Other compositions comprise as the two GAS antigens Spy2000 and a second GAS antigen selected from the group consisting of Spy0167, Spy0269, Spy0416, the mutant Spy0167 protein, the mutant Spy0416 protein, Spy0714, and Spy1390.

[0065] Other GAS antigens which can be included in compositions of the invention include Spy0019 (GAS5), Spy0163 (GAS23), Spy0385 (GAS56), Spy0714 (GAS67), Spy0737 (GAS68), Spy1274 (GAS84), Spy1361 (GAS88), Spy1390 (GAS89), Spy1733 (GAS95), Spy1882 (GAS98), Spy1979 (GAS99), Spy2000 (GAS100), Spy2016 (GAS102), Spy0591 (GAS130), Spy1105 (GAS159), Spy1718 (GAS179), Spy2025 (GAS193), Spy2043 (GAS195), Spy1939 (GAS277), Spy1625 (GAS372), and Spy1134 (GAS561).

[0066] Preferred combinations of GAS antigens include the following, each of which may also include a GAS polysaccharide antigen, as described below, and/or an adjuvant, such as alum:
[0067] i. Spy0167 and Spy0269;
[0068] ii. Spy0167, Spy0269, and Spy0416;
[0069] iii. Spy0167 and Spy0416;
[0070] iv. Spy0167 mutant P427L/W535F and Spy0269;
[0071] v. Spy0167 mutant P427L/W535F, Spy0269, and Spy0416;
[0072] vi. Spy0167 mutant P427L/W535F and Spy0416;
[0073] vii. Spy0269 and Spy0416 mutant D151A/S617A;
[0074] viii. Spy0167, Spy0269, and Spy0416 mutant D151A/S617A;
[0075] ix. Spy0167 and Spy0416 mutant D151A/S617A;
[0076] x. Spy0167 mutant P427L/W535F, Spy0269, and Spy0416 mutant D151A/S617A; and
[0077] xi. Spy0167 mutant P427L/W535F and Spy0416 mutant D151A/S617A.

[0078] The compositions can contain other components, such as pharmaceutically acceptable vehicles, antigens of other microorganisms, adjuvants, etc. In particular, any of the compositions described herein may further comprise a Group A polysaccharide antigen as described below and/or an adjuvant, such as alum.

[0079] As there is variance among wild-type GAS antigens between GAS M types and GAS strain isolates, references to the GAS amino acid or polynucleotide sequences herein include equivalent amino acid or polynucleotide sequences having some degree of sequence identity thereto, typically because of conservative amino acid substitutions (see Example 30 and FIGS. 31-33.

[0080] In some embodiments, variants of Spy0167, Spy0269, Spy0416, Spy0714, Spy1390, Spy2000, and disclosed mutants thereof have amino acid sequences which are at least 90%, 91%, 92%, 93%, 94%, 95%, 96%, 97%, 98%, or 99% identical to any of the Spy0167, Spy0269, Spy0416, Spy0714, Spy1390, Spy2000 amino acid sequences disclosed herein, respectively. Typically any difference between the amino acid sequence of a GAS antigen and the amino acid sequence of a variant of the GAS antigen is due to one or more conservative amino acid substitutions. As indicated in FIG. 31 for example, one, two, or three amino acid deletions also are possible.

[0081] In some embodiments conservative amino acid substitutions are based on chemical properties and include substitution of a positively-charged amino acid for another positively charged amino acid (e.g., H, K, R); a negatively-charged amino acid for another negatively charged amino acid (e.g., D, E); a very hydrophobic amino acid for another very hydrophobic amino acid (e.g., C, F, I, L, M, V, W); a less hydrophobic amino acid for another less hydrophobic amino acid (e.g., A, G, H, P, S, T, Y); a partly hydrophobic amino acid for another partly hydrophobic amino acid (e.g., K, R); an aliphatic amino acid for another aliphatic amino acid (e.g., A, I, L, M, P, V); a polar amino acid for another polar amino acid (e.g., A, D, E, G, H, K, N, P, Q, R, S, T, Y); an aromatic amino acid for another aromatic amino acid (e.g., F, H, W, Y); and a small amino acid for another small amino acid (e.g., D, N, T).

[0082] In some embodiments, conservative amino acid substitutions are determined using the BLOSUM62 table. The BLOSUM62 table is an amino acid substitution matrix derived from about 2,000 local multiple alignments of protein sequence segments, representing highly conserved regions of more than 500 groups of related proteins (Henikoff & Henikoff, Proc. Nall. Acad. Sci. USA 89:10915, 1992). The BLOSUM62 substitution frequencies can be used to define conservative amino acid substitutions that may be introduced into amino acid sequences of Spy0167, Spy0269, Spy0416, Spy0714, Spy1390, and Spy2000 antigens. In these embodiments a conservative substitution preferably refers to a substitution represented by a BLOSUM62 value of greater than −1. For example, an amino acid substitution is conservative if the substitution is characterized by a BLOSUM62 value of 0, 1, 2, or 3. According to this system, preferred conservative amino acid substitutions are characterized by a BLOSUM62 value of at least 1 (e.g., 1, 2 or 3), while more preferred conservative amino acid substitutions are characterized by a BLOSUM62 value of at least 2 (e.g., 2 or 3).

[0083] Particular amino acid substitutions or alterations can be identified by aligning the various Spy0167, Spy0269, Spy0416, Spy0714, Spy1390, and Spy2000 amino acid sequences as shown for wild-type Spy0416 in FIG. 31, wild-type Spy0269 in FIG. 32, and wild-type Spy0167 in FIG. 33. For example, based on the alignment in FIG. 31, Table 1 indicates some particular options at certain amino acid positions with respect to the Spy0416 amino acid sequence shown in SEQ ID NO:1. Similarly, options for amino acid variations in the amino acid sequences of Spy0269 and Spy0167 can be identified by inspection of FIGS. 32 and 33, respectively.

TABLE 1

| position | options |
|---|---|
| 38 | S, T |
| 40 | M, S, T |
| 49 | A, T |
| 55 | H, P |
| 67 | K, Q |
| 68 | S, P |
| 69 | Q, P |
| 74 | I, V |
| 77 | E, K |
| 85 | S, P |
| 87 | D, G |
| 91 | E, K |
| 93 | T or missing |
| 102 | A, S |
| 104 | S, P |
| 110 | S, P |
| 228 | A or missing |
| 229 | D, E, or missing |
| 749 | H, R |

[0084] Variants of the GAS antigens described below preferably are immunogenic and confer protection against GAS lethal challenge in a mouse model (see the Examples, below).

[0085] In some embodiments compositions comprise one or more nucleic acid molecules encoding the GAS protein antigens disclosed above. In other embodiments compositions comprise no more than two nucleic acid molecules encoding two GAS protein antigens. In other embodiments compositions comprise combinations of antibodies, wherein each antibody selectively binds to a GAS antigen selected from the GAS protein antigens disclosed above.

### Spy0167 and Immunogenic Mutants Thereof

[0086] Spy0167 (streptolysin, SLO, GAS25) is a potent pore-forming toxin which induces host cell lysis and is described, inter alia, in WO 02/34771. Amino acid sequences for wild-type Spy0167 are shown in SEQ ID NOS:107-119. Unless otherwise defined, a “Spy0167 antigen” includes full-length Spy0167 and Spy0167 mutants, fragments, and fusions, as described below.

[0087] In some embodiments a Spy0167 antigen consists essentially of the amino acid sequence SEQ ID NO:174 (“peptide 1”), the amino acid sequence SEQ ID NO:175 (“peptide 2”), or the amino acid sequence SEQ ID NO:176 (“peptide 3”). In some embodiments a Spy0167 antigen consists essentially of, from N to C terminus, the amino acid sequence SEQ ID NO:175 (“peptide 2”) and the amino acid sequence SEQ ID NO:176 (“peptide 3”) covalently attached to the amino acid sequence SEQ ID NO:175. “Covalently attached” as used herein includes direct covalent linkage as well as linkage via one or more additional amino acids. In other embodiments a Spy0167 antigen consists essentially of, from N to C terminus, the amino acid sequence SEQ ID NO:174; a glycine residue covalently attached to the amino acid sequence SEQ ID NO:174; the amino acid sequence SEQ ID NO:175 covalently attached to the glycine; and the amino acid sequence SEQ ID NO:176 covalently attached to the amino acid sequence SEQ ID NO:175.

[0088] Other Spy0167 antigens are fragments of Spy0167 which are less than full-length Spy0167 by at least one amino acid. Preferably the fragments retain an immunological property of the antigen, such as the ability to bind specific antibodies. Preferred amino acid fragments comprise 7 or more amino acids (e.g., 8, 10, 12, 14, 16, 18, 20, 25, 30, 35, 40, 50 or more).

[0089] In some embodiments, a Spy0167 antigen is a monomer which comprises the amino acid sequence SEQ ID NO:174. In other embodiments a Spy0167 antigen is a monomer which comprises, from N to C terminus, the amino acid sequence SEQ ID NO:175 and the amino acid sequence SEQ ID NO:176 covalently attached to the amino acid sequence SEQ ID NO:175. In other embodiments a Spy0167 antigen is a monomer which comprises, from N to C terminus, the amino acid sequence SEQ ID NO:174; a glycine residue covalently attached to the amino acid sequence SEQ ID NO:174; the amino acid sequence SEQ ID NO:175 covalently attached to the glycine; and the amino acid sequence SEQ ID NO:176 covalently attached to the amino acid sequence SEQ ID NO:175.

### Fusion Proteins

[0090] As disclosed above, Spy0167 antigens used in the invention may be present in the composition as individual separate polypeptides (e.g., “peptide 1,” “peptide 2,” “peptide 3,” “peptide 1+2+3,” “peptide 2+3”), but there also are embodiments in which at least two (i.e., 2, 3, 4, 5, 6, 7, 8, 9, 10, 11, 12, 13, 14, 15, 16, 17, 18, 19 or 20) antigens are expressed as a single polypeptide chain (a “fusion protein” or “hybrid polypeptide”). Hybrid polypeptides offer two principal advantages. First, a polypeptide that may be unstable or poorly expressed on its own can be assisted by adding a suitable hybrid partner that overcomes the problem. Second, commercial manufacture is simplified as only one expression and purification need be employed in order to produce two polypeptides which are both antigenically useful.

[0091] Mutant Forms of Spy0167

[0092] Mutant forms of Spy0167 have at least 50% less hemolytic activity than wild-type Spy0167 (e.g., 50, 55, 60, 65, 70, 75, 80, 85, 90, 95, 96, 97, 98, 99, or 100%) relative to wild-type Spy0167 as determined by a hemolysis assay (e.g., see Example 1) but are immunogenic and preferably confer protection against GAS lethal challenge in a mouse model (see Examples 4, 7, 8). Spy0167 mutants include those with an amino acid alteration (i.e., a substitution, deletion, or insertion) at one or more of amino acids P427, W535, C530, A248, and D482 numbered according to the wild-type Spy0167 sequence shown in SEQ ID NO:107. Examples of such mutants include P427L (SEQ ID NO:120), W535F (SEQ ID NO:121), C530G (SEQ ID NO:122), ΔA248 (SEQ ID NO:123), W535F/D482N (SEQ ID NO:124), P427L/W535F (SEQ ID NO:125), P427L/C530G (SEQ ID NO:126), and P427L/C530G/W535F (SEQ ID NO:127).

[0093] Spy0167 mutants for use in the invention include single, double, or triple amino acid alterations (“single mutants,” “double mutants,” “triple mutants”) at positions P427, W535, C530, A248, and/or D482. Thus, Spy0167 mutants can comprise the following:
[0094] i. P427L (SEQ ID NO:120), P427R, P427N, P427C, P427Q, P427E, P427G, P427H, P427I, P427L, P427K, P427M, P427F, P427A, P427S, P427T, P427W, P427Y, or P427V;
[0095] ii. W535F (SEQ ID NO:121), W535R, W535N, W535D, W535C, W535Q, W535E, W535G, W535I, W535L, W535K, W535M, W535A, W535P, W535S, W535T, W535Y, or W535V;
[0096] iii. C530G (SEQ ID NO:122), C530R, C530N, C530D, C530S, C530Q, C530E, C530A, C530H, C530I, C530L, C530K, C530M, C530F, C530P, C530T, C530W, C530Y, or C530V;
[0097] iv. D482L, D482R, D482N, D482C, D482Q, D482E, D482G, D482H, D482I, D482L, D482K, D482M, D482F, D482A, D482S, D482T, D482W, D482Y, or D482V;
[0098] v. A248L, A248R, A248N, A248C, A248Q, A248E, A248G, A248H, A248I, A248L, A248K, A248M, A248F, A248S, A248T, A248W, A248Y, or A248V
[0099] vi. ΔP427; or ΔW535; or ΔC530; or ΔD482; or ΔA248 (SEQ ID NO:123); and
[0100] vii. combinations thereof, such as:
   [0101] 1. double mutants W535F/D482N (SEQ ID NO:124), P427L/W535F (SEQ ID NO:125), and P427L/C530G (SEQ ID NO:126), P427L/A248L, P427L/D482L, W535F/C530G, W535F/A248L, W535F/D482L, C530G/A248L, and A248L/D482L; and
   [0102] 2. triple mutants P427L/C530G/A248L, P427L/C530G/D482L, P427L/A248L/D482L, P427L/C530G/W535F (SEQ ID NO:127), W535F/C530G/A248L, W535F/C530G/D482L, W535F/A248L/D482L, and C530G/A248L/D482L

[0103] Mutant Spy0167 proteins also include fusion polypeptides which comprise a mutant Spy0167 protein as disclosed above and another GAS antigen. GAS antigens are disclosed, e.g., in WO 02/34771 and include, but are not limited to, GAS39 (Spy0266; gi13621542), GAS40 (Spy0269; discussed below), GAS42 (Spy0287; gi13621559), GAS45 (M5005_Spy0249; gi71910063), GAS57 (Spy0416; discussed below), GAS58 (Spy0430; gi13621663), GAS67 (Spy0714; gi13621898), GAS68 (Spy0163; gi13621456), GAS84 (SPy1274; gi13622398), GAS88 (Spy1361; gi13622470), GAS 89 (Spy1390; gi13622493), GAS95 (SPy1733; gi13622787), GAS98 (Spy1882; gi13622916), GAS99 (Spy1979; gi13622993), GAS100 (Spy2000; gi13623012), GAS102 (Spy2016, gi13623025), GAS117 (Spy0448; gi13621679), GAS130 (Spy0591; gi13621794), GAS137 (Spy0652; gi13621842), GAS146 (Spy0763; gi13621942), GAS159 (Spy1105; gi13622244), GAS179 (Spy1718, gi13622773), GAS193 (Spy2025; gi3623029), GAS195 (Spy2043; gi13623043), GAS202 (Spy1309; gi13622431), GAS217 (Spy0925, gi1362208), GAS236 (Spy1126; gi13622264), GAS277 (Spy1939; gi13622962), GAS290 (SPy1959; gi13622978), GAS290 (SPy1959; gi13622978), GAS294 (Spy1173; gi13622306), GAS309 (Spy0124; gi13621426), GAS366 (Spy1525; gi13622612), GAS372 (Spy1625; gi13622698), GAS384 (Spy1874; gi13622908), GAS389 (Spy1981; gi13622996), GAS504 (Spy1751; gi13622806), GAS509 (Spy1618; gi13622692), GAS511 (Spy1743; gi13622798), GAS527 (Spy1204; gi3622332), GAS529 (Spy1280; gi3622403), GAS533 (Spy1877; gi13622912), GAS561 (Spy1134; gi13622269), GAS613 (Spy01673; gi13622736), and GAS681 (spy1152; gi1362228), as well as other antigens listed in Tables A-D, below. The gi numbers for these antigens are for the M1 strain, where available, but it will be appreciated that equivalent proteins from other M strains may also be used.

[0104] Preferred Spy0167 antigens according to the invention are immunogenic but not toxic. “Non-toxic” as used herein means that the Spy0167 antigen cannot bind to cholesterol or cannot form oligomers and, more in general, does not promote lysis of cholesterol-containing membranes. An Spy0167 protein can be rendered non-toxic, for example, by deleting at least the single cysteine residue, located in a highly conserved region in the C-terminal section of Spy0167 that can be used as a signature pattern for thiol-activated cytolysins.

[0105] Compositions of the invention also can comprise equivalents of Spy0167 mutants which are single polypeptides, which have at least 50% less hemolytic activity than wild-type Spy0167 (e.g., 50, 55, 60, 65, 70, 75, 80, 85, 90, 95, 96, 97, 98, 99, or 100%) relative to wild-type Spy0167 as determined by a hemolytic assay, which are immunogenic, and which preferably confer protection against GAS lethal challenge in a mouse model. Such equivalents may include mutant Spy0167 antigens with amino acid deletions, insertions, and/or substitutions at positions other than P427, W535, C530, A248, and D482, including deletions of up to about 40 amino acids at the N or C terminus (e.g., 1, 2, 3, 4, 5, 6, 7, 8, 9, 10, 11, 12, 13, 14, 15, 16, 17, 18, 19, 20, 21, 22, 23, 24, 25, 26, 27, 28, 29, 30, 31, 32, 33, 34, 35, 36, 37, 38, 39, or 40 amino acids).

### Spy0269

[0106] GAS40, also known as “Spy0269” (M1), “SpyM3_{—}0197” (M3), “SpyM18_{—}0256” (M18) and “prgA,” is described e.g., in WO 02/34771 and in WO 2005/032582. Amino acid sequences of wild-type Spy0269 are provided in SEQ ID NOS:50-106 and 128-130. Spy0269 antigens are particularly useful in compositions of the invention because Spy0269 proteins are highly conserved both in many M types and in multiple strains of these M types (see WO 2006/042027). Spy0269 consistently provides protection in the animal model of systemic immunization and challenge and induction of bactericidal antibodies.

[0107] A Spy0269 protein typically contains a leader peptide sequence (e.g., amino acids 1-26 of SEQ ID NO:50), a first coiled-coil region (e.g., amino acids 58-261 of SEQ ID NO:50), a second coiled coil region (e.g., amino acids 556-733 of SEQ ID NO:50), a leucine zipper region (e.g., amino acids 673-701 of SEQ ID NO:50) and a transmembrane region (e.g., amino acids 855-866 of SEQ ID NO:50). In some embodiments the leader sequence is removed (e.g., SEQ ID NO:177).

[0108] Compositions of the invention also can comprise equivalents of Spy0269 which are single polypeptides, which are immunogenic, and which preferably confer protection against GAS lethal challenge in a mouse model (e.g., Examples 4, 7, 8).

### Spy0416 and Immunogenic Mutants Thereof

[0109] Spy0416 (M1) is also referred to as “GAS57,” ‘SpyM3_{—}0298’ (M3), ‘SpyM18_{—}0464’ (M18), and ‘prtS.’ Spy0416 has been identified as a putative cell envelope proteinase. See WO 02/34771 and US 2006/0258849. There are 49 Spy0416 sequences from 17 different M types (1, 2, 3, 4, 6, 11, 12, 18, 22, 23, 28, 44/61, 68, 75, 77, 89, 94); according to the Centers for Disease Control, the 17 different M types account for over 95% of pharyngitis cases and about 68% of the invasive GAS isolates in the United States. Amino acid sequences of wild-type Spy0416 antigens from various M types are set forth in the sequence listing as SEQ ID NOS:1-49. Compositions of the invention also can comprise equivalents of Spy0416 which are single polypeptides, which are immunogenic, and which preferably confer protection against GAS lethal challenge in a mouse model.

[0110] Mutant Spy0416 antigens according to the invention have a proteolytic activity against interleukin 8 (IL-8) which is reduced by at least 50% (e.g., 50, 55, 60, 65, 70, 75, 80, 85, 90, 95, 96, 97, 98, 99, or 100%) relative to wild-type Spy0416 as detected by either SDS-PAGE or ELISA (see Example 3), but are immunogenic, e.g., they confer protection against GAS lethal challenge in a mouse model. Preferably, a mutant Spy0416 of the invention also does not cleave other human cytokines, such as CXCL1/GROα (e.g., SEQ ID NO:131), CXCL2/GROβ (e.g., SEQ ID NO:132), CXCL3/GROγ (e.g., SEQ ID NO:133), CXCL4 (e.g., SEQ ID NO:134), CXCL12/SDF-1a (e.g., SEQ ID NO:135), CXCL12/SDF-1β (e.g., SEQ ID NO:136), CXCL12/SDF-1γ (e.g., SEQ ID NO:137), CXCL5/ENA78 (e.g, SEQ ID NO:138), CXCL6/GCP-2 (e.g., SEQ ID NO:139), CXCL7/NAP-2 (e.g., SEQ ID NO:140), CXCL9/MIG (e.g., SEQ ID NO:141), CXCL10/IP10 (e.g., SEQ ID NO:142), CXCL11 (e.g., SEQ ID NO:143), CXCL13 (e.g., SEQ ID NO:144), CXCL14 (e.g., SEQ ID NO:145), and CXCL16 (e.g., SEQ ID NO:146).

[0111] Spy0416 mutants useful in the invention include those with at an amino acid alteration (i.e., a substitution, deletion, or insertion) at one or more of amino acids D151, H279, or S617, numbered according to the wild-type Spy0416 sequence shown in SEQ ID NO:1, including single, double, or triple amino acid alterations (“single mutants,” “double mutants,” “triple mutants”) at positions D151, H279, and/or 5617. Thus, Spy0416 mutants can comprise the following:
[0112] i. D151A (SEQ ID NO:147), D151R, 151N, D151C, D151Q, D151E, D151G, D151H, D151I, D151L, D151K, D151M, D151F, D151P, D151S, D151T, D151W, D151Y, or D151V;
[0113] ii. H279A, H279R, H279N, H279D, H279C, H279Q, H279E, H279G, H279I, H279L, H279K, H279M, H279F, H279P, H279S, H279T, H279W, H279Y, or H279V;
[0114] iii. S617A (SEQ ID NO:148), S617R, S617N, S617D, S617C, S617Q, S617E, S617G, S617H, S617I, S617L, S617K, S617M, S617F, S617P, S617T, S617W, S617Y, or S617V;
[0115] iv. ΔD151; or ΔH279; or ΔS617; and
[0116] v. combinations thereof, such as D151A/S617A (SEQ ID NO:149, SEQ ID NO:198).

[0117] Spy0416 mutant antigens of the invention also include fusion polypeptides which comprise a Spy0416 mutant antigen as disclosed above and another GAS antigen. GAS antigens are disclosed, e.g., in WO 02/34771 and include, but are not limited to, all or a portion of Spy0019 (GAS5; gi15675086), Spy0163 (GAS23; gi15675077), Spy0167 (GAS25, discussed above), Spy0266 (GAS39; gi13621542), Spy0269 (GAS40, discussed above), Spy0287 (GAS42; gi13621559), M5005_Spy0249 (GAS45; gi71910063), Spy0385 (GAS56; gi15675097), Spy0430 (GAS58; gi13621663), Spy0714 (GAS67; gi13621898), Spy0163 (GAS68; gi13621456), Spy1274 (GAS84; gi13622398), Spy1361 (GAS88; gi13622470), Spy1390 (GAS89; gi13622493), Spy1733 (GAS95; 13622787), Spy1882 (GAS98; gi13622916), Spy1979 (GAS99; gi13622993), Spy2000 (GAS100; gi13623012), Spy2016 (GAS102; gi15675798), Spy0448 (GAS117; gi13621679), Spy0591 (GAS130; gi13621794), Spy0652 (GAS137; gi13621842), Spy0763 (GAS146; gi15674811), Spy1105 (GAS159; gi13622244), Spy1718 (GAS179, gi13622773), Spy2025 (GAS193; gi3623029), Spy2043 (GAS195; gi15675815), Spy1309 (GAS202; gi13622431), Spy0925 (GAS217; gi1362208), Spy1126 (GAS236; gi13622264), Spy1939 (GAS277; gi13622962), Spy1959 (GAS290; gi13622978), Spy1173 (GAS294; gi13622306), Spy0124 (GAS309; gi13621426), Spy1525 (GAS366; gi13622612), Spy1625 (GAS372; gi13622698), Spy1874 (GAS384; gi13622908), Spy1981 (GAS389; gi13622996), Spy1751 (GAS504; gi13622806), Spy1618 (GAS509; gi13622692), Spy1743 (GAS511; gi13622798), Spy1204 (GAS527; gi3622332), Spy1280 (GAS529; gi3622403), Spy1877 (GAS533; gi13622912), Spy1134 (GAS561; gi13622269), Spy01673 (GAS613; gi13622736), Spy1152 (GAS681; gi1362228), or other antigens disclosed in Tables A-D below. The gi numbers for these antigens are for the M1 strain, where available, but it will be appreciated that equivalent proteins from other M strains may also be used.

[0118] The invention also includes equivalents of Spy0416 mutants which are single polypeptides, which do not cleave IL-8 as determined by SDS-PAGE or ELISA, which are immunogenic, and which preferably confer protection against GAS lethal challenge in a mouse model (e.g., Examples 4, 7, 8). Such equivalents may include mutant Spy0416 antigens with amino acid deletions, insertions, and/or substitutions at positions other than D151, H279, or 5617, including deletions of up to about 40 amino acids at the N or C terminus (e.g., 1, 2, 3, 4, 5, 6, 7, 8, 9, 10, 11, 12, 13, 14, 15, 16, 17, 18, 19, 20, 21, 22, 23, 24, 25, 26, 27, 28, 29, 30, 31, 32, 33, 34, 35, 36, 37, 38, 39, or 40 amino acids).

### Other GAS Antigens

[0119] One or more other GAS antigens can be included in compositions of the invention. GAS antigens are disclosed, for example, in WO 02/34771. Useful GAS antigens include all or portions of Spy0737, Spy0019, Spy0163, Spy0266, Spy0287 Spy0249, Spy0385, Spy0430, Spy0714, Spy0163, Spy1274, Spy1361, Spy1390, Spy1733, Spy1882, Spy1979, Spy2000, Spy2016, Spy0448, Spy0591, Spy0652, Spy0763, Spy1105, Spy1718, Spy2025, Spy2043, Spy1309, Spy0925, Spy1126, Spy1939, Spy1959, Spy1173, Spy0124, Spy1525, Spy1625, Spy1874, Spy1981, Spy1751, Spy1618, Spy1743, Spy1204, Spy1280, Spy1877, Spy1134, and Spy01673. Compositions of the invention also can comprise equivalents of these GAS antigens which are single polypeptides, which are immunogenic, and which preferably confer protection against GAS lethal challenge in a mouse model (e.g., Examples 4, 7, 8). For example, each of Spy0763 (GAS146) and Spy1134 (GAS561) protects mice against challenge with S. pyogenes M1 3348 (70% survival compared with 20% survival of the negative controls; n=20). See also Tables A-D, below.

TABLE A

| | | | | | in sequenced strains | | | |
|---|---|---|---|---|---|---|---|---|
| | SEQ | | | | genetic | average % | Serotype distribution: | |
| ANTIGEN | ID NO: | Surfome | Secretome | FACS | distribution | identity | present in | missing in |
| spy0019 | 178 | 2/4 | 4/4 | pos. in 2/4 | 12/12 | >90% | | |
| spy0163 | 179 | no | 2/4 | pos. in 1/4 | 12/12 | >90% | | |
| spy0385 | 180 | no | no | not tested | 12/12 | >90% | | |
| spy0714 | 181 | no | no | not tested | 12/12 | >90% | | |
| spy0737 | 182 | no | no | not tested | 6/12 | 70% | M1, M4, M12, M28, | missing in |
| | | | | | | | M49 | M2, M3, |
| | | | | | | | | M5, M6, |
| | | | | | | | | M18 |
| spy1274 | 183 | no | no | not tested | 11/12 | >90% | M1, M2, M4, M5, | missing in |
| | | | | | | | M12, M28, M49 | M6 |
| spy1361 | 184 | no | no | not tested | 12/12 | >90% | | |
| spy1390 | 185 | 1/4 | 2/4 | pos. in 2/4 | 12/12 | >90% | | |
| spy1733 | 186 | no | no | pos. in 2/4 | 12/12 | >90% | | |
| spy1882 | 187 | 4/4 | 2/4 | pos. in 2/4 | 12/12 | >90% | | |
| spy1979 | 188 | no | 1/4 | pos. in 2/4 | 12/12 | >90% | | |
| spy2000 | 189 | no | 1/4 | pos. in 1/4 | 12/12 | >90% | | |
| spy2016 | 190 | no | no | not tested | 4/12, variants | >90% | M1, M12 | missing in |
| | | | | | M1 and M12 | within | | all the |
| | | | | | | variants | | others |
| spy0591 | 191 | no | no | pos. in 2/4 | 12/12 | >90% | | |
| spy1105 | 192 | no | no | not tested | 12/12 | >90% | | |
| spy1718 | 193 | 2/4 | no | pos. in 2/4 | 12/12 | >90% | Variant 1: M1, M2, | |
| | | | | | | within | M3, M5, M6, M12, | |
| | | | | | | variants | M18, Variant 2: M4, | |
| | | | | | | | M28, M49 | |
| spy2025 | 194 | no | no | not tested | 12/12 | >90% | | |
| spy2043 | 195 | no | 3/4 | pos. in 3/4 | 12/12 | >90% | | |
| spy1939 | 196 | 1/4 | 3/4 | pos. in 2/4 | 12/12 | >90% | | |
| spy1625 | 197 | no | no | not tested | 12/12 | >90% | | |

TABLE B

| | | | | | | | | | | | | | ALL | ALL |
|---|---|---|---|---|---|---|---|---|---|---|---|---|---|---|
| | | | | | | | | | | | | | STRAINS | STRAINS |
| ANTI- | 3348 M1 | | | EM5 M12 | | | 2721 M3 | | | 2071 M23 | | | SURF | SECR |
| GEN | FACS | SURF | SECR | FACS | SURF | SECR | FACS | SURF | SECR | FACS | SURF | SECR | FREQ | FREQ |
| | 322 | | Y | 268 | Y | Y | 13 | | Y | 31 | Y | Y | | ALL |
| spy0019 | 122 | | Y | 26 | | Y | 33 | | | 58 | | | | 2/4 |
| spy0163 | | | | | | | | | | | | | | |
| spy0385 | | | | | | | | | | | | | | |
| spy0714 | | | | | | | | | | | | | | |
| spy0737 | | | | | | | | | | | | | | |
| spy1274 | | | | | | | | | | | | | | |
| spy1361 | 120 | Y | Y | 254 | | | 7 | | Y | 92 | | | | 2/4 |
| spy1390 | 62 | | | 209 | | | 6 | | | 115 | | | | |
| spy1733 | 335 | Y | Y | 146 | Y | | 4 | Y | | 40 | Y | Y | 5/16 | 2/4 |
| spy1882 | 186 | | Y | 188 | | | 9 | | | 59 | | | | 1/4 |
| spy1979 | 163 | | Y | 80 | | | 15 | | | 22 | | | | 1/4 |
| spy2016 | 186 | | | 119 | | | 43 | | | 48 | | | | |
| spy0591 | | | | | | | | | | | | | | |
| spy1105 | 31 | Y | | 257 | | | 3 | Y | | 141 | | | | |
| spy1718 | | | | | | | | | | | | | | |
| spy2025 | 332 | | Y | 349 | | | 26 | | Y | 359 | | Y | | 3/4 |
| spy2043 | 225 | Y | Y | 203 | | | 37 | | Y | 71 | | Y | | 3/4 |
| spy1939 | | | | | | | | | | | | | | |
| spy1625 | | | | | | | | | | | | | | |

TABLE C

| | | PROTECTION | | |
|---|---|---|---|---|
| SEQ ID NO: | ANTIGEN | M1 | M12 | M23 |
| | | + | + | − |
| 178 | spy0019 | + | nd | nd |
| 179 | spy0163 | | | |
| 180 | spy0385 | | | |
| 181 | spy0714 | | | |
| 182 | spy0737 | | | |
| 183 | spy1274 | | | |
| 184 | spy1361 | + | − | nd |
| 185 | spy1390 | nd | + | nd |
| 186 | spy1733 | + | − | − |
| 187 | spy1882 | + | − | + |
| 188 | spy1979 | − | + | − |
| 189 | spy2000 | | | |
| 190 | spy2016 | + | − | + |
| 191 | spy0591 | | | |
| 192 | spy1105 | nd | − | + |
| 193 | spy1718 | | | |
| 194 | spy2025 | + | + | − |
| 195 | spy2043 | − | − | nd |
| 196 | spy1939 | | | |
| 197 | spy1625 | | | |

TABLE D

| | | FACS details | | | |
|---|---|---|---|---|---|
| | SEQ ID | 3348 M1 | EM5 M12 | 2721 M3 | 2071 M23 |
| ANTIGEN | NO: | 322 | 268 | 13 | 31 |
| spy0019 | 178 | 122 | 26 | 33 | 58 |
| spy0163 | 179 | | | | |
| spy0385 | 180 | | | | |
| spy0714 | 181 | | | | |
| spy0737 | 182 | | | | |
| spy1274 | 183 | | | | |
| spy1361 | 184 | 120 | 254 | 7 | 92 |
| spy1390 | 185 | 62 | 209 | 6 | 115 |
| spy1733 | 186 | 335 | 146 | 4 | 40 |
| spy1882 | 187 | 186 | 188 | 9 | 59 |
| spy1979 | 188 | 163 | 80 | 15 | 22 |
| spy2000 | 189 | | | | |
| spy2016 | 190 | 186 | 119 | 43 | 48 |
| spy0591 | 191 | | | | |
| spy1105 | 192 | 31 | 257 | 3 | 141 |
| spy1718 | 193 | | | | |
| spy2025 | 194 | 332 | 349 | 26 | 359 |
| spy2043 | 195 | 225 | 203 | 37 | 71 |
| spy1939 | 196 | | | | |
| spy1625 | 197 | | | | |

### Fragments

[0120] The length of fragments of the wild-type or mutant GAS proteins described above may vary depending on the amino acid sequence of the specific GAS antigen or mutant thereof, but the fragment is preferably at least seven consecutive amino acids, e.g., 8, 10, 12, 14, 16, 18, 20, 25, 30, 35, 40, 50, 60, 70, 80, 90, 100, 150, 200 or more, up to one amino acid less than a full-length wild-type or mutant GAS protein. Preferably the fragment is immunogenic and comprises one or more epitopes from the sequence. Other preferred fragments include (1) the N-terminal signal peptides of each identified GAS protein, (2) the identified GAS protein without their N-terminal signal peptides, and (3) each identified GAS protein in which up to 10 amino acid residues (e.g., 1, 2, 3, 4, 5, 6, 7, 8, 9, 10, 15, 20, 25 or more) are deleted from the N-terminus and/or the C-terminus (for example, the N-terminal amino acid residue may be deleted). Other fragments omit one or more domains of the protein (e.g., omission of a signal peptide, a cytoplasmic domain, a transmembrane domain, or an extracellular domain). In some embodiments the fragment is amino acids 33-324 of Spy0269.

### GAS Polysaccharide Antigen

[0121] GAS polysaccharide (PS) is a cell-wall polysaccharide present in all GAS strains. Antibody titers to PS correlate inversely with disease and colonization in children. In some embodiments compositions of the invention comprise a GAS polysaccharide antigen. S. pyogenes GAS carbohydrate typically features a branched structure with an L-rhamnopyranose (Rhap) backbone consisting of alternating alpha-(1→2) and alpha-(1→3) links and D-N-acetylglucosamine (GlcpNAc) residues beta-(1→3)-connected to alternating rhamnose rings (Kreis et al., Int. J. Biol. Macromol. 17, 117-30, 1995). GAS polysaccharide antigens useful in compositions of the invention have the formula:

[chemical structure]

wherein R is a terminal reducing L-Rhamnose or D-GlcpNAc and n is a number from about 3 to about 30.

[0122] The GAS polysaccharide antigen used according to the invention may be a substantially full-length GAS carbohydrate, as found in nature, or it may be shorter than the natural length. Full-length polysaccharides may be depolymerized to give shorter fragments for use with the invention, e.g., by hydrolysis in mild acid, by heating, by sizing chromatography, etc. However, it is preferred to use saccharides of substantially full-length. In particular, it is preferred to use saccharides with a molecular weight of about 10 kDa. Molecular masses can be measured by gel filtration relative to dextran standards.

[0123] The saccharide may be chemically modified relative to the GAS carbohydrate as found in nature. For example, the saccharide may be de N acetylated (partially or fully), N propionated (partially or fully), etc. The effect of de-acetylation etc., for example on immunogenicity, can be assessed by routine assays.

[0124] In some embodiments the GAS polysaccharide antigen is conjugated to a carrier, such as the mutated diphtheria toxin CRM197 (and other carriers described below. As described in the Examples, below, antibodies to PS conjugated with CRM197 (“GC”) induce GAS opsonophagocytic killing.

### Production of GAS Protein Antigens

[0125] Recombinant Production

[0126] The redundancy of the genetic code is well-known. Thus, any nucleic acid molecule (polynucleotide) which encodes one of the GAS antigens described herein can be used to produce that protein recombinantly. Nucleic acid molecules encoding wild-type GAS antigens also can be isolated from the appropriate S. pyogenes bacterium using standard nucleic acid purification techniques or can be synthesized using an amplification technique, such as the polymerase chain reaction (PCR), or by using an automatic synthesizer. See Caruthers et al., Nucl. Acids Res. Symp. Ser. 215, 223, 1980; Horn et al., Nucl. Acids Res. Symp. Ser. 225, 232, 1980; Hunkapiller et al., Nature 310, 105-11, 1984; Grantham et al., Nucleic Acids Res. 9, r43-r74, 1981.

[0127] cDNA molecules can be made with standard molecular biology techniques, using mRNA as a template. cDNA molecules can thereafter be replicated using molecular biology techniques well known in the art. An amplification technique, such as PCR, can be used to obtain additional copies of polynucleotides of the invention, using either genomic DNA or cDNA as a template.

[0128] If desired, polynucleotides can be engineered using methods generally known in the art to alter antigen-encoding sequences for a variety of reasons, including but not limited to, alterations which modify the cloning, processing, and/or expression of the polypeptide or mRNA product. DNA shuffling by random fragmentation and PCR reassembly of gene fragments and synthetic oligonucleotides can be used to engineer the nucleotide sequences. For example, site directed mutagenesis can be used to insert new restriction sites, alter glycosylation patterns, change codon preference, produce splice variants, introduce mutations, and so forth.

[0129] Sequence modifications, such as the addition of a purification tag sequence or codon optimization, can be used to facilitate expression. For example, the N-terminal leader sequence may be replaced with a sequence encoding for a tag protein such as polyhistidine (“HIS”) or glutathione S-transferase (“GST”). Such tag proteins may be used to facilitate purification, detection, and stability of the expressed protein. Codons preferred by a particular prokaryotic or eukaryotic host can be selected to increase the rate of protein expression or to produce an RNA transcript having desirable properties, such as a half life which is longer than that of a transcript generated from the naturally occurring sequence. These methods are well known in the art and are further described in WO05/032582.

[0130] Expression Vectors

[0131] A nucleic acid molecule which encodes a GAS antigen for use in the invention can be inserted into an expression vector which contains the necessary elements for the transcription and translation of the inserted coding sequence. Methods which are well known to those skilled in the art can be used to construct expression vectors containing coding sequences and appropriate transcriptional and translational control elements. These methods include in vitro recombinant DNA techniques, synthetic techniques, and in vivo genetic recombination.

[0132] Host Cells

[0133] Host cells for producing GAS antigens can be prokaryotic or eukaryotic. E. coli is a preferred host cell, but other suitable hosts include Lactococcus lactis, Lactococcus cremoris, Bacillus subtilis, Vibrio cholerae, Salmonella typhi, Salmonella typhimurium, Neisseria lactamica, Neisseria cinerea, Mycobacteria (e.g., M. tuberculosis), yeasts, baculovirus, mammalian cells, etc.

[0134] A host cell strain can be chosen for its ability to modulate the expression of the inserted sequences or to process the expressed polypeptide in the desired fashion. Such modifications of the polypeptide include, but are not limited to, acetylation, carboxylation, glycosylation, phosphorylation, lipidation, and acylation. Post translational processing which cleaves a “prepro” form of the polypeptide also can be used to facilitate correct insertion, folding and/or function. Different host cells which have specific cellular machinery and characteristic mechanisms for post translational activities are available from the American Type Culture Collection (ATCC; 10801 University Boulevard, Manassas, Va. 20110-2209) and can be chosen to ensure the correct modification and processing of a foreign protein. See WO 01/98340.

[0135] Expression constructs can be introduced into host cells using well-established techniques which include, but are not limited to, transferrin-polycation-mediated DNA transfer, transfection with naked or encapsulated nucleic acids, liposome-mediated cellular fusion, intracellular transportation of DNA-coated latex beads, protoplast fusion, viral infection, electroporation, “gene gun” methods, and DEAE- or calcium phosphate-mediated transfection.

[0136] Host cells transformed with expression vectors can be cultured under conditions suitable for the expression and recovery of the protein from cell culture. The protein produced by a transformed cell can be secreted or contained intracellularly depending on the nucleotide sequence and/or the expression vector used. Those of skill in the art understand that expression vectors can be designed to contain signal sequences which direct secretion of soluble antigens through a prokaryotic or eukaryotic cell membrane.

[0137] Purification

[0138] Signal export sequences can be included in a recombinantly produced GAS antigen so that the antigen can be purified from cell culture medium using known methods. Alternatively, recombinantly produced GAS antigens can be isolated from engineered host cells and separated from other components in the cell, such as proteins, carbohydrates, or lipids, using methods well-known in the art. Such methods include, but are not limited to, size exclusion chromatography, ammonium sulfate fractionation, ion exchange chromatography, affinity chromatography, and preparative gel electrophoresis. A preparation of purified GAS antigens is at least 80% pure; preferably, the preparations are 90%, 95%, or 99% pure. Purity of the preparations can be assessed by any means known in the art, such as SDS-polyacrylamide gel electrophoresis or RP-HPLC analysis. Where appropriate, mutant Spy0167 proteins can be solubilized, for example, with urea.

[0139] Chemical Synthesis

[0140] GAS antigens can be synthesized, for example, using solid phase techniques. See, e.g., Merrifield, J. Am. Chem. Soc. 85, 2149 54, 1963; Roberge et al., Science 269, 202 04, 1995. Protein synthesis can be performed using manual techniques or by automation. Automated synthesis can be achieved, for example, using Applied Biosystems 431A Peptide Synthesizer (Perkin Elmer). Optionally, fragments of GAS antigens can be separately synthesized and combined using chemical methods to produce a full-length molecule.

### Antibodies

[0141] Some compositions of the invention comprise combinations of antibodies which specifically bind to GAS antigens described herein. An antibody “specifically binds” to a GAS antigen if it provides a detection signal at least 5-, 10-, or 20-fold higher than a detection signal provided with a different protein when used in an immunochemical assay. Preferably, antibodies that specifically bind to a GAS antigen do not detect other proteins in immunochemical assays and can immunoprecipitate the GAS antigen from solution.

[0142] The term “antibody” includes intact immunoglobulin molecules, as well as fragments thereof which are capable of binding an antigen. These include hybrid (chimeric) antibody molecules (e.g., Winter et al., Nature 349, 293-99, 1991; U.S. Pat. No. 4,816,567); F(ab′)2 and F(ab) fragments and Fv molecules; non-covalent heterodimers (e.g., Inbar et al., Proc. Natl. Acad. Sci. U.S.A. 69, 2659-62, 1972; Ehrlich et al., Biochem 19, 4091-96, 1980); single-chain Fv molecules (sFv) (e.g., Huston et al., Proc. Natl. Acad. Sci. U.S.A. 85, 5897-83, 1988); dimeric and trimeric antibody fragment constructs; minibodies (e.g., Pack et al., Biochem 31, 1579-84, 1992; Cumber et al., J. Immunology 149B, 120-26, 1992); humanized antibody molecules (e.g., Riechmann et al., Nature 332, 323-27, 1988; Verhoeyan et al., Science 239, 1534-36, 1988; and U.K. Patent Publication No. GB 2,276,169, published 21 Sep. 1994); and any functional fragments obtained from such molecules, as well as antibodies obtained through non-conventional processes such as phage display. Preferably, the antibodies are monoclonal antibodies. Methods of obtaining monoclonal antibodies are well known in the art.

[0143] Typically, at least 6, 7, 8, 10, or 12 contiguous amino acids are required to form an epitope. However, epitopes which involve non-contiguous amino acids may require more, e.g., at least 15, 25, or 50 amino acids. Various immunoassays (e.g., Western blots, ELISAs, radioimmunoassays, immunohistochemical assays, immunoprecipitations, or other immunochemical assays known in the art) can be used to identify antibodies having the desired specificity. Numerous protocols for competitive binding or immunoradiometric assays are well known in the art. Such immunoassays typically involve the measurement of complex formation between an immunogen and an antibody which specifically binds to the immunogen. A preparation of antibodies which specifically bind to a GAS antigen typically provides a detection signal at least 5-, 10-, or 20-fold higher than a detection signal provided with other proteins when used in an immunochemical assay and does not provide a detectable signal if contacted with an “irrelevant” protein. Preferably, the antibodies do not detect other proteins in immunochemical assays and can immunoprecipitate the particular antigen from solution.

[0144] Antibodies which specifically bind to wild-type Spy0167 substantially reduce (e.g., by at least 50%, 60%, 70%, 80%, 90%, 95%, 97%, 98%, or 99%) or eliminate its hemolytic activity. Some antibodies also specifically bind to the mutant Spy0167 proteins described above.

[0145] Antibodies which specifically bind to wild-type Spy0416 substantially reduce (e.g., by at least 50%) or eliminate the ability of Spy0416 to cleave IL-8 (Example 5). Antibodies may reduce the ability of Spy0416 to cleave IL-8 by at least 50%, 60%, 70%, 80%, 90%, 95%, 97%, 98%, or 99%. Some antibodies also specifically bind to the mutant Spy0416 proteins described above. Preferred antibodies also reduce or eliminate the ability of Spy0416 to cleave other substrates such as homologs of IL-8 (e.g., CXCL1/GROα, CXCL2/GROβ, CXCL3/GROγ, CXCL4, CXCL12/SDF-1α, CXCL12/SDF-1β, CXCL12/SDF-1γ, CXCL5/ENA 78, CXCL6/GCP-2, CXCL7/NAP-2, CXCL9/MIG, CXCL10/IP10, CXCL11, CXCL13, CXCL14, and CXCL16. Some antibodies block the progression of necrotic lesions in animals immunized with wild-type or mutant Spy0416 recombinant antigen and challenged with GAS.

[0146] Antibodies which specifically bind to Spy0269 substantially reduce (e.g., by at least 50%, 60%, 70%, 80%, 90%, 95%, 97%, 98%, or 99%) or eliminate binding of Spy0269 to epithelial cells as measured by the cell binding assay described in Example 25.

[0147] Generation of Antibodies

[0148] GAS antigens can be used to immunize a mammal, such as a mouse, rat, rabbit, guinea pig, monkey, or human, to produce polyclonal antibodies. If desired, an antigen can be conjugated to a carrier protein, such as bovine serum albumin, thyroglobulin, and keyhole limpet hemocyanin. Depending on the host species, various adjuvants can be used to increase the immunological response. Such adjuvants include, but are not limited to, Freund's adjuvant, mineral gels (e.g., aluminum hydroxide), and surface active substances (e.g. lysolecithin, pluronic polyols, polyanions, peptides, oil emulsions, keyhole limpet hemocyanin, and dinitrophenol). Among adjuvants used in humans, BCG (bacilli Calmette-Guerin) and Corynebacterium parvum are especially useful.

[0149] Monoclonal antibodies which specifically bind to an antigen can be prepared using any technique which provides for the production of antibody molecules by continuous cell lines in culture. These techniques include, but are not limited to, the hybridoma technique, the human B cell hybridoma technique, and the EBV hybridoma technique (Kohler et al., Nature 256, 495 497, 1985; Kozbor et al., J. Immunol. Methods 81, 3142, 1985; Cote et al., Proc. Natl. Acad. Sci. 80, 2026 2030, 1983; Cole et al., Mol. Cell. Biol. 62, 109 120, 1984).

[0150] In addition, techniques developed for the production of “chimeric antibodies,” the splicing of mouse antibody genes to human antibody genes to obtain a molecule with appropriate antigen specificity and biological activity, can be used (Morrison et al., Proc. Natl. Acad. Sci. 81, 68516855, 1984; Neuberger et al., Nature 312, 604 608, 1984; Takeda et al., Nature 314, 452 454, 1985). Monoclonal and other antibodies also can be “humanized” to prevent or reduce the risk of a patient from mounting an immune response against the antibody when it is used therapeutically. Such antibodies may be sufficiently similar in sequence to human antibodies to be used directly in therapy or may require alteration of a few key residues. Sequence differences between rodent antibodies and human sequences can be minimized by replacing residues which differ from those in the human sequences by site directed mutagenesis of individual residues or by grating of entire complementarity determining regions.

[0151] Alternatively, humanized antibodies can be produced using recombinant methods, as described below. Antibodies which specifically bind to a particular antigen can contain antigen binding sites which are either partially or fully humanized, as disclosed in U.S. Pat. No. 5,565,332.

[0152] Alternatively, techniques described for the production of single chain antibodies can be adapted using methods known in the art to produce single chain antibodies which specifically bind to a particular antigen. Antibodies with related specificity, but of distinct idiotypic composition, can be generated by chain shuffling from random combinatorial immunoglobin libraries (Burton, Proc. Natl. Acad. Sci. 88, 11120 23, 1991).

[0153] Single-chain antibodies also can be constructed using a DNA amplification method, such as PCR, using hybridoma cDNA as a template (Thirion et al., 1996, Eur. J. Cancer Prev. 5, 507-11). Single-chain antibodies can be mono- or bispecific, and can be bivalent or tetravalent. Construction of tetravalent, bispecific single-chain antibodies is taught, for example, in Coloma & Morrison, Nat. Biotechnol. 15, 159-63, 1997. Construction of bivalent, bispecific single-chain antibodies is taught in Mallender & Voss, J. Biol. Chem. 269, 199-206, 1994.

[0154] A nucleotide sequence encoding a single-chain antibody can be constructed using manual or automated nucleotide synthesis, cloned into an expression construct using standard recombinant DNA methods, and introduced into a cell to express the coding sequence, as described below. Alternatively, single-chain antibodies can be produced directly using, for example, filamentous phage technology (Verhaar et al., Int. J. Cancer 61, 497-501, 1995; Nicholls et al., J. Immunol. Meth. 165, 81-91, 1993).

[0155] Antibodies which specifically bind to a particular antigen also can be produced by inducing in vivo production in the lymphocyte population or by screening immunoglobulin libraries or panels of highly specific binding reagents as disclosed in the literature (Orlandi et al., Proc. Natl. Acad. Sci. 86, 3833 3837, 1989; Winter et al., Nature 349, 293 299, 1991).

[0156] Chimeric antibodies can be constructed as disclosed in WO 93/03151. Binding proteins which are derived from immunoglobulins and which are multivalent and multispecific, such as the “diabodies” described in WO 94/13804, also can be prepared.

[0157] Antibodies can be purified by methods well known in the art. For example, antibodies can be affinity purified by passage over a column to which the relevant antigen is bound. The bound antibodies can then be eluted from the column using a buffer with a high salt concentration.

### Pharmaceutical Compositions

[0158] The invention also provides compositions for use as medicaments (e.g., as immunogenic compositions or vaccines). Compositions of the invention are useful for preventing S. pyogenes infection, reducing the risk of S. pyogenes infection, and/or treating disease caused as a result of S. pyogenes infection, such as bacteremia, meningitis, puerperal fever, scarlet fever, erysipelas, pharyngitis, impetigo, necrotizing fasciitis, myositis or toxic shock syndrome.

[0159] Compositions containing GAS antigens are preferably immunogenic compositions, and are more preferably vaccine compositions. The pH of such compositions preferably is between 6 and 8, preferably about 7. The pH can be maintained by the use of a buffer. The composition can be sterile and/or pyrogen free. The composition can be isotonic with respect to humans.

[0160] Vaccines according to the invention may be used either prophylactically or therapeutically, but will typically be prophylactic. Accordingly, the invention includes a method for the therapeutic or prophylactic treatment of a Streptococcus pyogenes infection. The animal is preferably a mammal, most preferably a human. The methods involve administering to the animal a therapeutic or prophylactic amount of the immunogenic compositions of the invention. The invention also provides the immunogenic compositions of the invention for treating, reducing the risk or, and/or preventing a S. pyogenes infection.

[0161] Some compositions of the invention comprise two different GAS antigens, as described above. Other compositions of the invention comprise at least one nucleic acid molecule which encodes the two different antigens. See, e.g., Robinson & Tones (1997) Seminars in Immunology 9:271-283; Donnelly et al. (1997) Ann. Rev Immunol 15:617-648; Scott-Taylor & Dalgleish (2000) Expert Opin Investig Drugs 9:471-480; Apostolopoulos & Plebanski (2000) Curr Opin Mol Ther 2:441-447; Ilan (1999) Curr Opin Mol Ther 1:116-120; Dubensky et al. (2000) Mol Med 6:723-732; Robinson & Pertmer (2000) Adv Virus Res 55:1-74; Donnelly et al. (2000) Am J Respir Crit Care Med 162(4 Pt 2):S190-193; Davis (1999) Mt. Sinai J. Med. 66:84-90. Typically the nucleic acid molecule is a DNA molecule, e.g., in the form of a plasmid.

[0162] Other compositions of the invention, which are useful therapeutically, comprise two different antibodies, each of which specifically binds to one of the two different GAS antigens.

[0163] In some embodiments, compositions of the invention can include one or more additional active agents. Such agents include, but are not limited to, (a) a polypeptide antigen which is useful in a pediatric vaccine, (b) a polypeptide antigen which is useful in a vaccine for elderly or immunocompromised individuals, (c) a nucleic acid molecule encoding (a) or (b), and (d) an antibody which specifically binds to (a) or (b).

[0164] Additional Antigens

[0165] Compositions of the invention may be administered in conjunction with one or more additional antigens for use in therapeutic or prophylactic methods of the present invention. Suitable antigens include those listed below. Additionally, the compositions of the present invention may be used to treat, reduce the risk of, or prevent infections caused by any of the below-listed pathogens. In addition to combination with the antigens described below, the compositions of the invention may also be combined with an adjuvant as described herein.

[0166] Additional antigens for use with the invention include, but are not limited to, one or more of the following antigens set forth below, or antigens derived from one or more of the pathogens set forth below:

### A. BACTERIAL ANTIGENS

[0167] Bacterial antigens suitable for use in the invention include proteins, polysaccharides, lipopolysaccharides, and outer membrane vesicles which may be isolated, purified or derived from a bacteria. In addition, bacterial antigens may include bacterial lysates and inactivated bacteria formulations. Bacteria antigens may be produced by recombinant expression. Bacterial antigens preferably include epitopes which are exposed on the surface of the bacteria during at least one stage of its life cycle. Bacterial antigens are preferably conserved across multiple serotypes. Bacterial antigens include antigens derived from one or more of the bacteria set forth below as well as the specific antigens examples identified below.

[0168] Neisseria meningitides: Meningitides antigens may include proteins (such as those identified in References 1-7), saccharides (including a polysaccharide, oligosaccharide or lipopolysaccharide), or outer-membrane vesicles (References 8, 9, 10, 11) purified or derived from N. meningitides serogroup such as A, C, W135, Y, and/or B. Meningitides protein antigens may be selected from adhesions, autotransporters, toxins, Fe acquisition proteins, and membrane associated proteins (preferably integral outer membrane protein).

[0169] Streptococcus pneumoniae: Streptococcus pneumoniae antigens may include a saccharide (including a polysaccharide or an oligosaccharide) and/or protein from Streptococcus pneumoniae. Saccharide antigens may be selected from serotypes 1, 2, 3, 4, 5, 6B, 7F, 8, 9N, 9V, 10A, 11A, 12F, 14, 15B, 17F, 18C, 19A, 19F, 20, 22F, 23F, and 33F. Protein antigens may be selected from a protein identified in WO 98/18931, WO 98/18930, U.S. Pat. No. 6,699,703, U.S. Pat. No. 6,800,744, WO 97/43303, and WO 97/37026. Streptococcus pneumoniae proteins may be selected from the Poly Histidine Triad family (PhtX), the Choline Binding Protein family (CbpX), CbpX truncates, LytX family, LytX truncates, CbpX truncate-LytX truncate chimeric proteins, pneumolysin (Ply), PspA, PsaA, Sp128, Sp101, Sp130, Sp125 or Sp133.

[0170] Streptococcus pyogenes (Group A Streptococcus): Group A Streptococcus antigens may include a protein identified in WO 02/34771 or WO 2005/032582 (including, but not limited to, GAS39 (Spy0266), GAS40 (Spy0269, discussed above), GAS42 (Spy0287), GAS45(M5005_Spy0249), GAS57 (Spy0416), GAS58 (Spy0430), GAS67 (Spy0714), GAS68 (Spy0163), GAS84 (SPy1274), GAS88 (Spy1361), GAS 89 (Spy1390) GAS95 (SPy1733), GAS98 (Spy1882), GAS99 (Spy1979), GAS100 (Spy2000), GAS102 (Spy2016), GAS117 (Spy0448), GAS130 (Spy0591), GAS137 (Spy0652), GAS146 (Spy0763), GAS159 (Spy1105), GAS179 (Spy1718), GAS193 (Spy2025), GAS195 (Spy2043), GAS202 (Spy1309), GAS217 (Spy0925), GAS236 (Spy1126), GAS277 (Spy1939), GAS294 (Spy1173), GAS309 (Spy0124), GAS366 (Spy1525), GAS372 (Spy1625), GAS384 (Spy1874), GAS389 (Spy1981), GAS504 (Spy1751), GAS509 (Spy1618), GAS290 (SPy1959), GAS511 (Spy1743), GAS527 (Spy1204), GAS529 (Spy1280), GAS533 (Spy1877), GAS561 (Spy1134), GAS613 (Spy01673), and GAS681 (spy1152), other GAS antigens described above and in Tables A-D, fusions of fragments of GAS M proteins (including those described in WO 02/094851, and Dale, Vaccine (1999) 17:193-200, and Dale, Vaccine 14(10): 944-948), fibronectin binding protein (Sfbl), Streptococcal heme-associated protein (Shp), and Streptolysin S (SagA).

[0171] Moraxella catarrhalis: Moraxella antigens include antigens identified in WO 02/18595 and WO 99/58562, outer membrane protein antigens (HMW-OMP), C-antigen, and/or LPS.

[0172] Bordetella pertussis: Pertussis antigens include petussis holotoxin (PT) and filamentous haemagglutinin (FHA) from B. pertussis, optionally also combination with pertactin and/or agglutinogens 2 and 3 antigen.

[0173] Staphylococcus aureus: Staphylococcus aureus antigens include S. aureus type 5 and 8 capsular polysaccharides optionally conjugated to nontoxic recombinant Pseudomonas aeruginosa exotoxin A, such as StaphVAX™, or antigens derived from surface proteins, invasins (leukocidin, kinases, hyaluronidase), surface factors that inhibit phagocytic engulfment (capsule, Protein A), carotenoids, catalase production, Protein A, coagulase, clotting factor, and/or membrane-damaging toxins (optionally detoxified) that lyse eukaryotic cell membranes (hemolysins, leukotoxin, leukocidin).

[0174] Staphylococcus epidermis: S. epidermidis antigens include slime-associated antigen (SAA).

[0175] Clostridium tetani (Tetanus): Tetanus antigens include tetanus toxoid (TT), preferably used as a carrier protein in conjunction/conjugated with the compositions of the present invention.

[0176] Cornynebacterium diphtheriae (Diphtheria): Diphtheria antigens include diphtheria toxin, preferably detoxified, such as CRM197. Additionally antigens capable of modulating, inhibiting or associated with ADP ribosylation are contemplated for combination/co-administration/conjugation with the compositions of the present invention. The diphtheria toxoids may be used as carrier proteins.

[0177] Haemophilus influenzae B (Hib): Hib antigens include a Hib saccharide antigen.

[0178] Pseudomonas aeruginosa: Pseudomonas antigens include endotoxin A, Wzz protein, P. aeruginosa LPS, more particularly LPS isolated from PAO1 (O5 serotype), and/or Outer Membrane Proteins, including Outer Membrane Proteins F (OprF) (Infect Immun. 2001 May; 69(5): 3510-3515).

[0179] Legionella pneumophila. Bacterial antigens may be derived from Legionella pneumophila.

[0180] Streptococcus agalactiae (Group B Streptococcus): Group B Streptococcus antigens include a protein or saccharide antigen identified in WO 02/34771, WO 03/093306, WO 04/041157, or WO 2005/002619 (including proteins GBS 80, GBS 104, GBS 276 and GBS 322, and including saccharide antigens derived from serotypes Ia, Ib, Ia/c, II, III, IV, V, VI, VII and VIII).

[0181] Neiserria gonorrhoeae: Gonorrhoeae antigens include Por (or porin) protein, such as PorB (see Zhu et al., Vaccine (2004) 22:660-669), a transferring binding protein, such as TbpA and TbpB (See Price et al., Infection and Immunity (2004) 71(1):277-283), a opacity protein (such as Opa), a reduction-modifiable protein (Rmp), and outer membrane vesicle (OMV) preparations (see Plante et al., J. Infectious Disease 182, 848-55, 2000), also see e.g. WO99/24578, WO99/36544, WO99/57280, WO02/079243).

[0182] Chlamydia trachomatis: Chlamydia trachomatis antigens include antigens derived from serotypes A, B, Ba and C (agents of trachoma, a cause of blindness), serotypes L1, L2 & L3 (associated with Lymphogranuloma venereum), and serotypes, D-K. Chlamydia trachomas antigens may also include an antigen identified in WO 00/37494, WO 03/049762, WO 03/068811, or WO 05/0026f19, including PepA (CT045), LcrE (CT089), ArtJ (CT381), DnaK (CT396), CT398, OmpH-like (CT242), L7/L12 (CT316), OmcA (CT444), AtosS (CT467), CT547, Eno (CT587), HrtA (CT823), and MurG (CT761).

[0183] Treponema pallidum (Syphilis): Syphilis antigens include TmpA antigen.

[0184] Haemophilus ducreyi (causing chancroid): Ducreyi antigens include outer membrane protein (DsrA).

[0185] Enterococcus faecalis or Enterococcus faecium: Antigens include a trisaccharide repeat or other Enterococcus derived antigens provided in U.S. Pat. No. 6,756,361.

[0186] Helicobacter pylori: H. pylori antigens include Cag, Vac, Nap, HopX, HopY and/or urease antigen.

[0187] Staphylococcus saprophyticus: Antigens include the 160 kDa hemagglutinin of S. saprophyticus antigen.

[0188] Yersinia enterocolitica antigens include LPS (Infect Immun. 2002 August; 70(8): 4414).

[0189] E. coli: E. coli antigens may be derived from enterotoxigenic E. coli (ETEC), enteroaggregative E. coli (EAggEC), diffusely adhering E. coli (DAEC), enteropathogenic E. coli (EPEC), and/or enterohemorrhagic E. coli (EHEC).

[0190] Bacillus anthracis (anthrax): B. anthracis antigens are optionally detoxified and may be selected from A-components (lethal factor (LF) and edema factor (EF)), both of which can share a common B-component known as protective antigen (PA).

[0191] Yersinia pestis (plague): Plague antigens include F1 capsular antigen (Infect Immun. 2003 January; 71(1)): 374-383, LPS (Infect Immun. 1999 October; 67(10): 5395), Yersinia pestis V antigen (Infect Immun. 1997 November; 65(11): 4476-4482).

[0192] Mycobacterium tuberculosis: Tuberculosis antigens include lipoproteins, LPS, BCG antigens, a fusion protein of antigen 85B (Ag85B) and/or ESAT-6 optionally formulated in cationic lipid vesicles (Infect Immun. 2004 October; 72(10): 6148), Mycobacterium tuberculosis (Mtb) isocitrate dehydrogenase associated antigens (Proc Natl Acad Sci USA. 2004 Aug. 24; 101(34): 12652), and/or MPT51 antigens (Infect Immun. 2004 July; 72(7): 3829).

[0193] Rickettsia: Antigens include outer membrane proteins, including the outer membrane protein A and/or B (OmpB) (Biochim Biophys Acta. 2004 Nov. 1; 1702(2):145), LPS, and surface protein antigen (SPA) (J Autoimmun. 1989 June; 2 Suppl:81).

[0194] Listeria monocytogenes. Bacterial antigens may be derived from Listeria monocytogenes.

[0195] Chlamydia pneumoniae: Antigens include those identified in WO 02/02606.

[0196] Vibrio cholerae: Antigens include proteinase antigens, LPS, particularly lipopolysaccharides of Vibrio cholerae II, O1 Inaba O-specific polysaccharides, V. cholera 0139, antigens of IEM108 vaccine (Infect Immun. 2003 October; 71(10):5498-504), and/or Zonula occludens toxin (Zot).

[0197] Salmonella typhi (typhoid fever): Antigens include capsular polysaccharides preferably conjugates (Vi, i.e. vax-TyVi).

[0198] Borrelia burgdorferi (Lyme disease): Antigens include lipoproteins (such as OspA, OspB, Osp C and Osp D), other surface proteins such as OspE-related proteins (Erps), decorin-binding proteins (such as DbpA), and antigenically variable VI proteins., such as antigens associated with P39 and P13 (an integral membrane protein, Infect Immun. 2001 May; 69(5): 3323-3334), VlsE Antigenic Variation Protein (J Clin Microbiol. 1999 December; 37(12): 3997).

[0199] Porphyromonas gingivalis: Antigens include P. gingivalis outer membrane protein (OMP).

[0200] Klebsiella: Antigens include an OMP, including OMP A, or a polysaccharide optionally conjugated to tetanus toxoid.

[0201] Further bacterial antigens of the invention may be capsular antigens, polysaccharide antigens or protein antigens of any of the above. Further bacterial antigens may also include an outer membrane vesicle (OMV) preparation. Additionally, antigens include live, attenuated, and/or purified versions of any of the aforementioned bacteria. The antigens of the present invention may be derived from gram-negative or gram-positive bacteria. The antigens of the present invention may be derived from aerobic or anaerobic bacteria.

[0202] Additionally, any of the above bacterial-derived saccharides (polysaccharides, LPS, LOS or oligosaccharides) can be conjugated to another agent or antigen, such as a carrier protein (for example CRM197). Such conjugation may be direct conjugation effected by reductive amination of carbonyl moieties on the saccharide to amino groups on the protein, as provided in U.S. Pat. No. 5,360,897 and Can J Biochem Cell Biol. 1984 May; 62(5):270-5. Alternatively, the saccharides can be conjugated through a linker, such as, with succinamide or other linkages provided in Bioconjugate Techniques, 1996 and CRC, Chemistry of Protein Conjugation and Cross-Linking, 1993.

### B. VIRAL ANTIGENS

[0203] Viral antigens suitable for use in the invention include inactivated (or killed) virus, attenuated virus, split virus formulations, purified subunit formulations, viral proteins which may be isolated, purified or derived from a virus, and Virus Like Particles (VLPs). Viral antigens may be derived from viruses propagated on cell culture or other substrate. Alternatively, viral antigens may be expressed recombinantly. Viral antigens preferably include epitopes which are exposed on the surface of the virus during at least one stage of its life cycle. Viral antigens are preferably conserved across multiple serotypes or isolates. Viral antigens include antigens derived from one or more of the viruses set forth below as well as the specific antigens examples identified below.

[0204] Orthomyxovirus: Viral antigens may be derived from an Orthomyxovirus, such as Influenza A, B and C. Orthomyxovirus antigens may be selected from one or more of the viral proteins, including hemagglutinin (HA), neuraminidase (NA), nucleoprotein (NP), matrix protein (M1), membrane protein (M2), one or more of the transcriptase components (PB1, PB2 and PA). Preferred antigens include HA and NA.

[0205] Influenza antigens may be derived from interpandemic (annual) flu strains. Alternatively influenza antigens may be derived from strains with the potential to cause pandemic a pandemic outbreak (i.e., influenza strains with new haemagglutinin compared to the haemagglutinin in currently circulating strains, or influenza strains which are pathogenic in avian subjects and have the potential to be transmitted horizontally in the human population, or influenza strains which are pathogenic to humans).

[0206] Paramyxoviridae viruses: Viral antigens may be derived from Paramyxoviridae viruses, such as Pneumoviruses (RSV), Paramyxoviruses (PIV) and Morbilliviruses (Measles).

[0207] Pneumovirus: Viral antigens may be derived from a Pneumovirus, such as Respiratory syncytial virus (RSV), Bovine respiratory syncytial virus, Pneumonia virus of mice, and Turkey rhinotracheitis virus. Preferably, the Pneumovirus is RSV. Pneumovirus antigens may be selected from one or more of the following proteins, including surface proteins Fusion (F), Glycoprotein (G) and Small Hydrophobic protein (SH), matrix proteins M and M2, nucleocapsid proteins N, P and L and nonstructural proteins NS1 and NS2. Preferred Pneumovirus antigens include F, G and M. See e.g., J Gen Virol. 2004 November; 85(Pt 11):3229). Pneumovirus antigens may also be formulated in or derived from chimeric viruses. For example, chimeric RSV/PIV viruses may comprise components of both RSV and PIV.

[0208] Paramyxovirus: Viral antigens may be derived from a Paramyxovirus, such as Parainfluenza virus types 1-4 (PIV), Mumps, Sendai viruses, Simian virus 5, Bovine parainfluenza virus and Newcastle disease virus. Preferably, the Paramyxovirus is PIV or Mumps. Paramyxovirus antigens may be selected from one or more of the following proteins: Hemagglutinin-Neuraminidase (HN), Fusion proteins F1 and F2, Nucleoprotein (NP), Phosphoprotein (P), Large protein (L), and Matrix protein (M). Preferred Paramyxovirus proteins include FIN, F1 and F2. Paramyxovirus antigens may also be formulated in or derived from chimeric viruses. For example, chimeric RSV/PIV viruses may comprise components of both RSV and PIV. Commercially available mumps vaccines include live attenuated mumps virus, in either a monovalent form or in combination with measles and rubella vaccines (MMR).

[0209] Morbillivirus: Viral antigens may be derived from a Morbillivirus, such as Measles. Morbillivirus antigens may be selected from one or more of the following proteins: hemagglutinin (H), Glycoprotein (G), Fusion factor (F), Large protein (L), Nucleoprotein (NP), Polymerase phosphoprotein (P), and Matrix (M). Commercially available measles vaccines include live attenuated measles virus, typically in combination with mumps and rubella (MMR).

[0210] Picornavirus: Viral antigens may be derived from Picornaviruses, such as Enteroviruses, Rhinoviruses, Heparnavirus, Cardioviruses and Aphthoviruses. Antigens derived from Enteroviruses, such as Poliovirus are preferred.

[0211] Enterovirus: Viral antigens may be derived from an Enterovirus, such as Poliovirus types 1, 2 or 3, Coxsackie A virus types 1 to 22 and 24, Coxsackie B virus types 1 to 6, Echovirus (ECHO) virus) types 1 to 9, 11 to 27 and 29 to 34 and Enterovirus 68 to 71. Preferably, the Enterovirus is poliovirus. Enterovirus antigens are preferably selected from one or more of the following Capsid proteins VP1, VP2, VP3 and VP4. Commercially available polio vaccines include Inactivated Polio Vaccine (IPV) and Oral poliovirus vaccine (OPV).

[0212] Heparnavirus: Viral antigens may be derived from an Heparnavirus, such as Hepatitis A virus (HAV). Commercially available HAV vaccines include inactivated HAV vaccine.

[0213] Togavirus: Viral antigens may be derived from a Togavirus, such as a Rubivirus, an Alphavirus, or an Arterivirus. Antigens derived from Rubivirus, such as Rubella virus, are preferred. Togavirus antigens may be selected from E1, E2, E3, C, NSP-1, NSPO-2, NSP-3 or NSP-4. Togavirus antigens are preferably selected from E1, E2 or E3. Commercially available Rubella vaccines include a live cold-adapted virus, typically in combination with mumps and measles vaccines (MMR).

[0214] Flavivirus: Viral antigens may be derived from a Flavivirus, such as Tick-borne encephalitis (TBE), Dengue (types 1, 2, 3 or 4), Yellow Fever, Japanese encephalitis, West Nile encephalitis, St. Louis encephalitis, Russian spring-summer encephalitis, Powassan encephalitis. Flavivirus antigens may be selected from PrM, M, C, E, NS-1, NS-2a, NS2b, NS3, NS4a, NS4b, and NS5. Flavivirus antigens are preferably selected from PrM, M and E. Commercially available TBE vaccine include inactivated virus vaccines.

[0215] Pestivirus: Viral antigens may be derived from a Pestivirus, such as Bovine viral diarrhea (BVDV), Classical swine fever (CSFV) or Border disease (BDV).

[0216] Hepadnavirus: Viral antigens may be derived from a Hepadnavirus, such as Hepatitis B virus. Hepadnavirus antigens may be selected from surface antigens (L, M and S), core antigens (HBc, HBe). Commercially available HBV vaccines include subunit vaccines comprising the surface antigen S protein.

[0217] Hepatitis C virus: Viral antigens may be derived from a Hepatitis C virus (HCV). HCV antigens may be selected from one or more of E1, E2, E1/E2, NS345 polyprotein, NS 345-core polyprotein, core, and/or peptides from the nonstructural regions (Houghton et al., Hepatology (1991) 14:381).

[0218] Rhabdovirus: Viral antigens may be derived from a Rhabdovirus, such as a Lyssavirus (Rabies virus) and Vesiculovirus (VSV). Rhabdovirus antigens may be selected from glycoprotein (G), nucleoprotein (N), large protein (L), nonstructural proteins (NS). Commercially available Rabies virus vaccine comprise killed virus grown on human diploid cells or fetal rhesus lung cells.

[0219] Caliciviridae; Viral antigens may be derived from Caliciviridae, such as Norwalk virus, and Norwalk-like Viruses, such as Hawaii Virus and Snow Mountain Virus.

[0220] Coronavirus: Viral antigens may be derived from a Coronavirus, SARS, Human respiratory Coronavirus, Avian infectious bronchitis (IBV), Mouse hepatitis virus (MHV), and Porcine transmissible gastroenteritis virus (TGEV). Coronavirus antigens may be selected from spike (S), envelope (E), matrix (M), nucleocapsid (N), and Hemagglutinin-esterase glycoprotein (HE). Preferably, the Coronavirus antigen is derived from a SARS virus. SARS viral antigens are described in WO 04/92360;

[0221] Retrovirus: Viral antigens may be derived from a Retrovirus, such as an Oncovirus, a Lentivirus or a Spumavirus. Oncovirus antigens may be derived from HTLV-1, HTLV-2 or HTLV-5. Lentivirus antigens may be derived from HIV-1 or HIV-2. Retrovirus antigens may be selected from gag, pol, env, tax, tat, rex, rev, nef, vif, vpu, and vpr. HIV antigens may be selected from gag (p24gag and p55gag), env (gp160 and gp41), pol, tat, nef, rev vpu, miniproteins, (preferably p55 gag and gp140v delete). HIV antigens may be derived from one or more of the following strains: HIVIIIb, HIVSF2, HIVLAV, HIVLAI, HIVMN, HIV-1CM235, HIV-1US4.

[0222] Reovirus: Viral antigens may be derived from a Reovirus, such as an Orthoreovirus, a Rotavirus, an Orbivirus, or a Coltivirus. Reovirus antigens may be selected from structural proteins λ1, λ2, λ3, μ1, μ2, σ1, σ2, or σ3, or nonstructural proteins σNS, μNS, or σ1s. Preferred Reovirus antigens may be derived from a Rotavirus. Rotavirus antigens may be selected from VP1, VP2, VP3, VP4 (or the cleaved product VP5 and VP8), NSP 1, VP6, NSP3, NSP2, VP7, NSP4, or NSP5. Preferred Rotavirus antigens include VP4 (or the cleaved product VP5 and VP8), and VP7.

[0223] Parvovirus: Viral antigens may be derived from a Parvovirus, such as Parvovirus B19.

[0224] Parvovirus antigens may be selected from VP-1, VP-2, VP-3, NS-1 and NS-2. Preferably, the Parvovirus antigen is capsid protein VP-2.

[0225] Delta hepatitis virus (HDV): Viral antigens may be derived HDV, particularly δ-antigen from HDV (see, e.g., U.S. Pat. No. 5,378,814).

[0226] Hepatitis E virus (HEV): Viral antigens may be derived from HEV.

[0227] Hepatitis G virus (HGV): Viral antigens may be derived from HGV.

[0228] Human Herpesvirus: Viral antigens may be derived from a Human Herpesvirus, such as

[0229] Herpes Simplex Viruses (HSV), Varicella-zoster virus (VZV), Epstein-Barr virus (EBV), Cytomegalovirus (CMV), Human Herpesvirus 6 (HHV6), Human Herpesvirus 7 (HHV7), and Human Herpesvirus 8 (HHV8). Human Herpesvirus antigens may be selected from immediate early proteins (α), early proteins (β), and late proteins (γ). HSV antigens may be derived from HSV-1 or HSV-2 strains. HSV antigens may be selected from glycoproteins gB, gC, gD and gH, fusion protein (gB), or immune escape proteins (gC, gE, or gI). VZV antigens may be selected from core, nucleocapsid, tegument, or envelope proteins. A live attenuated VZV vaccine is commercially available. EBV antigens may be selected from early antigen (EA) proteins, viral capsid antigen (VCA), and glycoproteins of the membrane antigen (MA). CMV antigens may be selected from capsid proteins, envelope glycoproteins (such as gB and gH), and tegument proteins

[0230] Papovaviruses: Antigens may be derived from Papovaviruses, such as Papillomaviruses and Polyomaviruses. Papillomaviruses include HPV serotypes 1, 2, 4, 5, 6, 8, 11, 13, 16, 18, 31, 33, 35, 39, 41, 42, 47, 51, 57, 58, 63 and 65. Preferably, HPV antigens are derived from serotypes 6, 11, 16 or 18. HPV antigens may be selected from capsid proteins (L1) and (L2), or E1 E7, or fusions thereof. HPV antigens are preferably formulated into virus-like particles (VLPs). Polyomyavirus viruses include BK virus and JK virus. Polyomavirus antigens may be selected from VP1, VP2 or VP3.

[0231] Further provided are antigens, compositions, methods, and microbes included in Vaccines, 4th Edition (Plotkin and Orenstein ed. 2004); Medical Microbiology 4th Edition (Murray et al. ed. 2002); Virology, 3rd Edition (W. K. Joklik ed. 1988); Fundamental Virology, 2nd Edition (B. N. Fields and D. M. Knipe, eds. 1991), which are contemplated in conjunction with the compositions of the present invention.

### C. FUNGAL ANTIGENS

[0232] Fungal antigens for use in the invention may be derived from one or more of the fungi set forth below.

[0233] Fungal antigens may be derived from Dermatophytres, including: Epidermophyton floccusum, Microsporum audouini, Microsporum canis, Microsporum distortum, Microsporum equinum, Microsporum gypsum, Microsporum nanum, Trichophyton concentricum, Trichophyton equinum, Trichophyton gallinae, Trichophyton gypseum, Trichophyton megnini, Trichophyton mentagrophytes, Trichophyton quinckeanum, Trichophyton rubrum, Trichophyton schoenleini, Trichophyton tonsurans, Trichophyton verrucosum, T. verrucosum var. album, var. discoides, var. ochraceum, Trichophyton violaceum, and/or Trichophyton faviforme.

[0234] Fungal pathogens may be derived from Aspergillus fumigatus, Aspergillus flavus, Aspergillus niger, Aspergillus nidulans, Aspergillus terreus, Aspergillus sydowi, Aspergillus flavatus, Aspergillus glaucus, Blastoschizomyces capitatus, Candida albicans, Candida enolase, Candida tropicalis, Candida glabrata, Candida krusei, Candida parapsilosis, Candida stellatoidea, Candida kusei, Candida parakwsei, Candida lusitaniae, Candida pseudotropicalis, Candida guilliermondi, Cladosporium carrionii, Coccidioides immitis, Blastomyces dermatidis, Cryptococcus neoformans, Geotrichum clavatum, Histoplasma capsulatum, Klebsiella pneumoniae, Paracoccidioides brasiliensis, Pneumocystis carinii, Pythiumn insidiosum, Pityrosporum ovale, Saccharomyces cerevisae, Saccharomyces boulardii, Saccharomyces pombe, Scedosporium apiosperum, Sporothrix schenckii, Trichosporon beigelii, Toxoplasma gondii, Penicillium marneffei, Malassezia spp., Fonsecaea spp., Wangiella spp., Sporothrix spp., Basidiobolus spp., Conidiobolus spp., Rhizopus spp, Mucor spp, Absidia spp, Mortierella spp, Cunninghamella spp, Saksenaea spp., Alternaria spp, Curvularia spp, Helminthosporium spp, Fusarium spp, Aspergillus spp, Penicillium spp, Monolinia spp, Rhizoctonia spp, Paecilomyces spp, Pithomyces spp, and Cladosporium spp.

[0235] Processes for producing fungal antigens are well known in the art (see U.S. Pat. No. 6,333,164). In a preferred method a solubilized fraction extracted and separated from an insoluble fraction obtainable from fungal cells of which cell wall has been substantially removed or at least partially removed, characterized in that the process comprises the steps of: obtaining living fungal cells; obtaining fungal cells of which cell wall has been substantially removed or at least partially removed; bursting the fungal cells of which cell wall has been substantially removed or at least partially removed; obtaining an insoluble fraction; and extracting and separating a solubilized fraction from the insoluble fraction.

### D. STD ANTIGENS

[0236] The compositions of the invention may include one or more antigens derived from a sexually transmitted disease (STD). Such antigens may provide for prophylactic or therapy for STD's such as chlamydia, genital herpes, hepatits (such as HCV), genital warts, gonorrhoea, syphilis and/or chancroid (See, WO00/15255). Antigens may be derived from one or more viral or bacterial STD's. Viral STD antigens for use in the invention may be derived from, for example, HIV, herpes simplex virus (HSV-1 and HSV-2), human papillomavirus (HPV), and hepatitis (HCV). Bacterial STD antigens for use in the invention may be derived from, for example, Neiserria gonorrhoeae, Chlamydia trachomatis, Treponema pallidum, Haemophilus ducreyi, E. coli, and Streptococcus agalactiae. Examples of specific antigens derived from these pathogens are described above.

### E. RESPIRATORY ANTIGENS

[0237] The compositions of the invention may include one or more antigens derived from a pathogen which causes respiratory disease. For example, respiratory antigens may be derived from a respiratory virus such as Orthomyxoviruses (influenza), Pneumovirus (RSV), Paramyxovirus (PIV), Morbillivirus (measles), Togavirus (Rubella), VZV, and Coronavirus (SARS). Respiratory antigens may be derived from a bacteria which causes respiratory disease, such as Streptococcus pneumoniae, Pseudomonas aeruginosa, Bordetella pertussis, Mycobacterium tuberculosis, Mycoplasma pneumoniae, Chlamydia pneumoniae, Bacillus anthracis, and Moraxella catarrhalis. Examples of specific antigens derived from these pathogens are described above.

### F. PEDIATRIC VACCINE ANTIGENS

[0238] The compositions of the invention may include one or more antigens suitable for use in pediatric subjects. Pediatric subjects are typically less than about 3 years old, or less than about 2 years old, or less than about 1 years old. Pediatric antigens may be administered multiple times over the course of 6 months, 1, 2 or 3 years. Pediatric antigens may be derived from a virus which may target pediatric populations and/or a virus from which pediatric populations are susceptible to infection. Pediatric viral antigens include antigens derived from one or more of Orthomyxovirus (influenza), Pneumovirus (RSV), Paramyxovirus (PIV and Mumps), Morbillivirus (measles), Togavirus (Rubella), Enterovirus (polio), HBV, Coronavirus (SARS), and Varicella-zoster virus (VZV), Epstein Barr virus (EBV). Pediatric bacterial antigens include antigens derived from one or more of Streptococcus pneumoniae, Neisseria meningitides, Streptococcus pyogenes (Group A Streptococcus), Moraxella catarrhalis, Bordetella pertussis, Staphylococcus aureus, Clostridium tetani (Tetanus), Cornynebacterium diphtheriae (Diphtheria), Haemophilus influenzae B (Hib), Pseudomonas aeruginosa, Streptococcus agalactiae (Group B Streptococcus), and E. coli. Examples of specific antigens derived from these pathogens are described above.

### G. ANTIGENS SUITABLE FOR USE IN ELDERLY OR IMMUNOCOMPROMISED INDIVIDUALS

[0239] The compositions of the invention may include one or more antigens suitable for use in elderly or immunocompromised individuals. Such individuals may need to be vaccinated more frequently, with higher doses or with adjuvanted formulations to improve their immune response to the targeted antigens. Antigens which may be targeted for use in Elderly or Immunocompromised individuals include antigens derived from one or more of the following pathogens: Neisseria meningitides, Streptococcus pneumoniae, Streptococcus pyogenes (Group A Streptococcus), Moraxella catarrhalis, Bordetella pertussis, Staphylococcus aureus, Staphylococcus epidermis, Clostridium tetani (Tetanus), Cornynebacterium diphtheriae (Diphtheria), Haemophilus influenzae B (Hib), Pseudomonas aeruginosa, Legionella pneumophila, Streptococcus agalactiae (Group B Streptococcus), Enterococcus faecalis, Helicobacter pylori, Chlamydia pneumoniae, Orthomyxovirus (influenza), Pneumovirus (RSV), Paramyxovirus (PIV and Mumps), Morbillivirus (measles), Togavirus (Rubella), Enterovirus (polio), HBV, Coronavirus (SARS), Varicella-zoster virus (VZV), Epstein Barr virus (EBV), Cytomegalovirus (CMV). Examples of specific antigens derived from these pathogens are described above.

### H. ANTIGENS SUITABLE FOR USE IN ADOLESCENT VACCINES

[0240] The compositions of the invention may include one or more antigens suitable for use in adolescent subjects. Adolescents may be in need of a boost of a previously administered pediatric antigen. Pediatric antigens which may be suitable for use in adolescents are described above. In addition, adolescents may be targeted to receive antigens derived from an STD pathogen in order to ensure protective or therapeutic immunity before the beginning of sexual activity. STD antigens which may be suitable for use in adolescents are described above.

### I. ANTIGEN FORMULATIONS

[0241] In other aspects of the invention, methods of producing microparticles having adsorbed antigens are provided. The methods comprise: (a) providing an emulsion by dispersing a mixture comprising (i) water, (ii) a detergent, (iii) an organic solvent, and (iv) a biodegradable polymer selected from the group consisting of a poly(α-hydroxy acid), a polyhydroxy butyric acid, a polycaprolactone, a polyorthoester, a polyanhydride, and a polycyanoacrylate. The polymer is typically present in the mixture at a concentration of about 1% to about 30% relative to the organic solvent, while the detergent is typically present in the mixture at a weight-to-weight detergent-to-polymer ratio of from about 0.00001:1 to about 0.1:1 (more typically about 0.0001:1 to about 0.1:1, about 0.001:1 to about 0.1:1, or about 0.005:1 to about 0.1:1); (b) removing the organic solvent from the emulsion; and (c) adsorbing an antigen on the surface of the microparticles. In certain embodiments, the biodegradable polymer is present at a concentration of about 3% to about 10% relative to the organic solvent.

[0242] Microparticles for use herein will be formed from materials that are sterilizable, non-toxic and biodegradable. Such materials include, without limitation, poly(α-hydroxy acid), polyhydroxybutyric acid, polycaprolactone, polyorthoester, polyanhydride, PACA, and polycyanoacrylate. Preferably, microparticles for use with the present invention are derived from a poly(α-hydroxy acid), in particular, from a poly(lactide) (“PLA”) or a copolymer of D,L-lactide and glycolide or glycolic acid, such as a poly(D,L-lactide-co-glycolide) (“PLG” or “PLGA”), or a copolymer of D,L-lactide and caprolactone. The microparticles may be derived from any of various polymeric starting materials which have a variety of molecular weights and, in the case of the copolymers such as PLG, a variety of lactide:glycolide ratios, the selection of which will be largely a matter of choice, depending in part on the coadministered macromolecule. These parameters are discussed more fully below.

[0243] Further antigens may also include an outer membrane vesicle (OMV) preparation.

[0244] Additional formulation methods and antigens (especially tumor antigens) are provided in U.S. patent Ser. No. 09/581,772.

### J. ANTIGEN REFERENCES

[0245] The following references include antigens useful in conjunction with the compositions of the present invention:
[0246] 1 International patent application WO99/24578
[0247] 2 International patent application WO99/36544.
[0248] 3 International patent application WO99/57280.
[0249] 4 International patent application WO00/22430.
[0250] 5 Tettelin et al. (2000) Science 287:1809-1815.
[0251] 6 International patent application WO96/29412.
[0252] 7 Pizza et al. (2000) Science 287:1816-1820.
[0253] 8 PCT WO 01/52885.
[0254] 9 Bjune et al. (1991) Lancet 338(8775).
[0255] 10 Fuskasawa et al. (1999) Vaccine 17:2951-2958.
[0256] 11 Rosenqist et al. (1998) Dev. Biol. Strand 92:323-333.
[0257] 12 Constantino et al. (1992) Vaccine 10:691-698.
[0258] 13 Constantino et al. (1999) Vaccine 17:1251-1263.
[0259] 14 Watson (2000) Pediatr Infect Dis J 19:331-332.
[0260] 15 Rubin (20000) Pediatr Clin North Am 47:269-285, v.
[0261] 16 Jedrzejas (2001) Microbiol Mol Biol Rev 65:187-207.
[0262] 17 International patent application filed on 3 Jul. 2001 claiming priority from GB-0016363.4;WO 02/02606; PCT IB/01/00166.
[0263] 18 Kalman et al. (1999) Nature Genetics 21:385-389.
[0264] 19 Read et al. (2000) Nucleic Acids Res 28:1397-406.
[0265] 20 Shirai et al. (2000) J. Infect. Dis 181(Suppl 3):5524-5527.
[0266] 21 International patent application WO99/27105.
[0267] 22 International patent application WO00/27994.
[0268] 23 International patent application WO00/37494.
[0269] 24 International patent application WO99/28475.
[0270] 25 Bell (2000) Pediatr Infect Dis J 19:1187-1188.
[0271] 26 Iwarson (1995) APMIS 103:321-326.
[0272] 27 Gerlich et al. (1990) Vaccine 8 Suppl:S63-68 & 79-80.
[0273] 28 Hsu et al. (1999) Clin Liver Dis 3:901-915.
[0274] 29 Gastofsson et al. (1996) N. Engl. J. Med. 334-:349-355.
[0275] 30 Rappuoli et al. (1991) TIBTECH 9:232-238.
[0276] 31 Vaccines (1988) eds. Plotkin & Mortimer. ISBN 0-7216-1946-0.
[0277] 32 Del Guidice et al. (1998) Molecular Aspects of Medicine 19:1-70.
[0278] 33 International patent application WO93/018150.
[0279] 34 International patent application WO99/53310.
[0280] 35 International patent application WO98/04702.
[0281] 36 Ross et al. (2001) Vaccine 19:135-142.
[0282] 37 Sutter et al. (2000) Pediatr Clin North Am 47:287-308.
[0283] 38 Zimmerman & Spann (1999) Am Fan Physician 59:113-118, 125-126.
[0284] 39 Dreensen (1997) Vaccine 15 Suppl″52-6.
[0285] 40 MMWR Morb Mortal Wkly rep 1998 Jan. 16:47(1):12, 9.
[0286] 41 McMichael (2000) Vaccine 19 Suppl 1:S101-107.
[0287] 42 Schuchat (1999) Lancer 353(9146):51-6.
[0288] 43 GB patent applications 0026333.5, 0028727.6 & 0105640.7.
[0289] 44 Dale (1999) Infect Disclin North Am 13:227-43, viii.
[0290] 45 Ferretti et al. (2001) PNAS USA 98: 4658-4663.
[0291] 46 Kuroda et al. (2001) Lancet 357(9264):1225-1240; see also pages 1218-1219.
[0292] 47 Ramsay et al. (2001) Lancet 357(9251):195-196.
[0293] 48 Lindberg (1999) Vaccine 17 Suppl 2:S28-36.
[0294] 49 Buttery & Moxon (2000) J R Coil Physicians Long 34:163-168.
[0295] 50 Ahmad & Chapnick (1999) Infect Dis Clin North Am 13:113-133, vii.
[0296] 51 Goldblatt (1998) J. Med. Microbiol. 47:663-567.
[0297] 52 European patent 0 477 508.
[0298] 53 U.S. Pat. No. 5,306,492.
[0299] 54 International patent application WO98/42721.
[0300] 55 Conjugate Vaccines (eds. Cruse et al.) ISBN 3805549326, particularly vol. 10:48-114.
[0301] 56 Hermanson (1996) Bioconjugate Techniques ISBN: 012323368 & 012342335X.
[0302] 57 European patent application 0372501.
[0303] 58 European patent application 0378881.
[0304] 59 European patent application 0427347.
[0305] 60 International patent application WO93/17712.
[0306] 61 International patent application WO98/58668.
[0307] 62 European patent application 0471177.
[0308] 63 International patent application WO00/56360.
[0309] 64 International patent application WO00/67161.

[0310] The contents of all of the above cited patents, patent applications and journal articles are incorporated by reference as if set forth fully herein.

[0311] Where a saccharide or carbohydrate antigen is used, it is preferably conjugated to a carrier protein in order to enhance immunogenicity. See Ramsay et al. (2001) Lancet 357(9251):195-196; Lindberg (1999) Vaccine 17 Suppl 2:S28-36; Buttery & Moxon (2000) J R Coll Physicians Lond 34:163-168; Ahmad & Chapnick (1999) Infect Dis Clin North Am 13:113-133, vii; Goldblatt (1998) J. Med. Microbiol. 47:563-567; European patent 0 477 508; U.S. Pat. No. 5,306,492; WO98/42721; Conjugate Vaccines (eds. Cruse et al.) ISBN 3805549326, particularly vol. 10:48-114; Hermanson (1996) Bioconjugate Techniques ISBN: 0123423368 or 012342335X. Preferred carrier proteins are bacterial toxins or toxoids, such as diphtheria or tetanus toxoids. The CRM197 diphtheria toxoid is particularly preferred.

[0312] Other carrier polypeptides include the N. meningitidis outer membrane protein (EP-A-0372501), synthetic peptides (EP-A-0378881 and EP-A 0427347), heat shock proteins (WO 93/17712 and WO 94/03208), pertussis proteins (WO 98/58668 and EP A 0471177), protein D from H. influenzae (WO 00/56360), cytokines (WO 91/01146), lymphokines, hormones, growth factors, toxin A or B from C. difficile (WO 00/61761), iron-uptake proteins (WO 01/72337), etc. Where a mixture comprises capsular saccharide from both serigraphs A and C, it may be preferred that the ratio (w/w) of MenA saccharide:MenC saccharide is greater than 1 (e.g., 2:1, 3:1, 4:1, 5:1, 10:1 or higher). Different saccharides can be conjugated to the same or different type of carrier protein. Any suitable conjugation reaction can be used, with any suitable linker where necessary.

[0313] Toxic protein antigens may be detoxified where necessary e.g., detoxification of pertussis toxin by chemical and/or genetic means.

[0314] Pharmaceutically Acceptable Carriers

[0315] Compositions of the invention will typically, in addition to the components mentioned above, comprise one or more “pharmaceutically acceptable carriers.” These include any carrier which does not itself induce the production of antibodies harmful to the individual receiving the composition. Suitable carriers typically are large, slowly metabolized macromolecules such as proteins, polysaccharides, polylactic acids, polyglycolic acids, polymeric amino acids, amino acid copolymers, and lipid aggregates (such as oil droplets or liposomes). Such carriers are well known to those of ordinary skill in the art. A composition may also contain a diluent, such as water, saline, glycerol, etc. Additionally, an auxiliary substance, such as a wetting or emulsifying agent, pH buffering substance, and the like, may be present. A thorough discussion of pharmaceutically acceptable components is available in Gennaro (2000) Remington: The Science and Practice of Pharmacy, 20th ed., ISBN: 0683306472.

### Immunoregulatory Agents

[0316] Adjuvants

[0317] Vaccines of the invention may be administered in conjunction with other immunoregulatory agents. In particular, compositions will usually include an adjuvant. Adjuvants for use with the invention include, but are not limited to, one or more of the following set forth below:

[0318] A. Mineral Containing Compositions

[0319] Mineral containing compositions suitable for use as adjuvants in the invention include mineral salts, such as aluminum salts and calcium salts. The invention includes mineral salts such as hydroxides (e.g. oxyhydroxides), phosphates (e.g. hydroxyphosphates, orthophosphates), sulfates, etc. (e.g. see chapters 8 & 9 of Vaccine Design . . . (1995) eds. Powell & Newman. ISBN: 030644867X, Plenum Press), or mixtures of different mineral compounds (e.g. a mixture of a phosphate and a hydroxide adjuvant, optionally with an excess of the phosphate), with the compounds taking any suitable form (e.g. gel, crystalline, amorphous, etc.), and with adsorption to the salt(s) being preferred. The mineral containing compositions may also be formulated as a particle of metal salt (WO00/23105).

[0320] Aluminum salts may be included in vaccines of the invention such that the dose of Al³⁺ is between 0.2 and 1.0 mg per dose.

[0321] In one embodiment the aluminum based adjuvant for use in the present invention is alum (aluminum potassium sulfate (AlK(SO₄)₂)), or an alum derivative, such as that formed in-situ by mixing an antigen in phosphate buffer with alum, followed by titration and precipitation with a base such as ammonium hydroxide or sodium hydroxide.

[0322] Another aluminum-based adjuvant for use in vaccine formulations of the present invention is aluminum hydroxide adjuvant (Al(OH)₃) or crystalline aluminum oxyhydroxide (AlOOH), which is an excellent adsorbant, having a surface area of approximately 500 m²/g. Alternatively, aluminum phosphate adjuvant (A1PO₄) or aluminum hydroxyphosphate, which contains phosphate groups in place of some or all of the hydroxyl groups of aluminum hydroxide adjuvant is provided. Preferred aluminum phosphate adjuvants provided herein are amorphous and soluble in acidic, basic and neutral media.

[0323] In another embodiment the adjuvant of the invention comprises both aluminum phosphate and aluminum hydroxide. In a more particular embodiment thereof, the adjuvant has a greater amount of aluminum phosphate than aluminum hydroxide, such as a ratio of 2:1, 3:1, 4:1, 5:1, 6:1, 7:1, 8:1, 9:1 or greater than 9:1, by weight aluminum phosphate to aluminum hydroxide. More particular still, aluminum salts in the vaccine are present at 0.4 to 1.0 mg per vaccine dose, or 0.4 to 0.8 mg per vaccine dose, or 0.5 to 0.7 mg per vaccine dose, or about 0.6 mg per vaccine dose.

[0324] Generally, the preferred aluminum-based adjuvant(s), or ratio of multiple aluminum-based adjuvants, such as aluminum phosphate to aluminum hydroxide is selected by optimization of electrostatic attraction between molecules such that the antigen carries an opposite charge as the adjuvant at the desired pH. For example, aluminum phosphate adjuvant (isoelectric point=4) adsorbs lysozyme, but not albumin at pH 7.4. Should albumin be the target, aluminum hydroxide adjuvant would be selected (iep 11.4). Alternatively, pretreatment of aluminum hydroxide with phosphate lowers its isoelectric point, making it a preferred adjuvant for more basic antigens.

[0325] B. Oil-Emulsions

[0326] Oil-emulsion compositions suitable for use as adjuvants in the invention include squalene-water emulsions, such as MF59 (5% Squalene, 0.5% TWEEN™ 80, and 0.5% Span 85, formulated into submicron particles using a microfluidizer). See WO90/14837. See also, Podda, Vaccine (2001) 19: 2673-2680; Frey et al., Vaccine (2003) 21:4234-4237. MF59 is used as the adjuvant in the FLUAD™ influenza virus trivalent subunit vaccine.

[0327] Particularly preferred adjuvants for use in the compositions are submicron oil-in-water emulsions. Preferred submicron oil-in-water emulsions for use herein are squalene/water emulsions optionally containing varying amounts of MTP-PE, such as a submicron oil-in-water emulsion containing 4-5% w/v squalene, 0.25-1.0% w/v TWEEN™ 80 (polyoxyethylenesorbitan monooleate), and/or 0.25-1.0% SPAN 85™ (sorbitan trioleate), and, optionally, N-acetylmuramyl-L-alanyl-D-isogluatminyl-L-alanine-2-(1′-2′-dipalmitoyl-sn-glycero-3-hydroxyphosphosphoryloxy)-ethylamine (MTP-PE), for example, the submicron oil-in-water emulsion known as “MF59” (International Publication No. WO90/14837; U.S. Pat. Nos. 6,299,884 and 6,451,325, and Ott et al., in Vaccine Design The Subunit and Adjuvant Approach (Powell, M. F. and Newman, M. J. eds.) Plenum Press, New York, 1995, pp. 277-296). MF59 contains 4-5% w/v Squalene (e.g. 4.3%), 0.25-0.5% w/v TWEEN™ 80, and 0.5% w/v SPAN 85™ and optionally contains various amounts of MTP-PE, formulated into submicron particles using a microfluidizer such as Model 110Y microfluidizer (Microfluidics, Newton, Mass.). For example, MTP-PE may be present in an amount of about 0-500 μg/dose, more preferably 0-250 μg/dose and most preferably, 0-100 μg/dose. As used herein, the term “MF59-0” refers to the above submicron oil-in-water emulsion lacking MTP-PE, while the term MF59-MTP denotes a formulation that contains MTP-PE. For instance, “MF59-100” contains 100 μg MTP-PE per dose, and so on. MF69, another submicron oil-in-water emulsion for use herein, contains 4.3% w/v squalene, 0.25% w/v TWEEN™ 80, and 0.75% w/v SPAN85™ and optionally MTP-PE. Yet another submicron oil-in-water emulsion is MF75, also known as SAF, containing 10% squalene, 0.4% TWEEN™ 80, 5% pluronic-blocked polymer L121, and thr-MDP, also microfluidized into a submicron emulsion. MF75-MTP denotes an MF75 formulation that includes MTP, such as from 100-400 μg MTP-PE per dose.

[0328] Submicron oil-in-water emulsions, methods of making the same and immunostimulating agents, such as muramyl peptides, for use in the compositions, are described in detail in WO90/14837 and U.S. Pat. Nos. 6,299,884 and 6,451,325.

[0329] Complete Freund's adjuvant (CFA) and incomplete Freund's adjuvant (IFA) may also be used as adjuvants in the invention.

[0330] C. Saponin Formulations

[0331] Saponin formulations, may also be used as adjuvants in the invention. Saponins are a heterologous group of sterol glycosides and triterpenoid glycosides that are found in the bark, leaves, stems, roots and even flowers of a wide range of plant species. Saponins isolated from the bark of the Quillaia saponaria Molina tree have been widely studied as adjuvants. Saponins can also be commercially obtained from Smilax ornata (sarsaprilla), Gypsophilla paniculata (brides veil), and Saponaria officianalis (soap root). Saponin adjuvant formulations include purified formulations, such as QS21, as well as lipid formulations, such as ISCOMs.

[0332] Saponin compositions have been purified using High Performance Thin Layer

[0333] Chromatography (HP-TLC) and Reversed Phase High Performance Liquid Chromatography (RP-HPLC). Specific purified fractions using these techniques have been identified, including QS7, QS17, QS18, QS21, QH-A, QH-B and QH-C. Preferably, the saponin is QS21. A method of production of QS21 is disclosed in U.S. Pat. No. 5,057,540. Saponin formulations may also comprise a sterol, such as cholesterol (see WO96/33739).

[0334] Combinations of saponins and cholesterols can be used to form unique particles called Immunostimulating Complexes (ISCOMs). ISCOMs typically also include a phospholipid such as phosphatidylethanolamine or phosphatidylcholine. Any known saponin can be used in ISCOMs. Preferably, the ISCOM includes one or more of Quil A, QHA and QHC. ISCOMs are further described in EP0109942, WO96/11711 and WO96/33739. Optionally, the ISCOMS may be devoid of (an) additional detergent(s). See WO00/07621.

[0335] A review of the development of saponin based adjuvants can be found in Barr, et al., Advanced Drug Delivery Reviews (1998) 32:247-271. See also Sjolander, et al., Advanced Drug Delivery Reviews (1998) 32:321-338.

[0336] D. Virosomes and Virus Like Particles (VLPs)

[0337] Virosomes and Virus Like Particles (VLPs) can also be used as adjuvants in the invention. These structures generally contain one or more proteins from a virus optionally combined or formulated with a phospholipid. They are generally non-pathogenic, non-replicating and generally do not contain any of the native viral genome. The viral proteins may be recombinantly produced or isolated from whole viruses. These viral proteins suitable for use in virosomes or VLPs include proteins derived from influenza virus (such as HA or NA), Hepatitis B virus (such as core or capsid proteins), Hepatitis E virus, measles virus, Sindbis virus, Rotavirus, Foot-and-Mouth Disease virus, Retrovirus, Norwalk virus, human Papilloma virus, HIV, RNA-phages, Qβ-phage (such as coat proteins), GA-phage, fr-phage, AP205 phage, and Ty (such as retrotransposon Ty protein p1). VLPs are discussed further in WO03/024480, WO03/024481, and Niikura et al., Virology (2002) 293:273-280; Lenz et al., Journal of Immunology (2001) 5246-5355; Pinto, et al., Journal of Infectious Diseases (2003) 188:327-338; and Gerber et al., Journal of Virology (2001) 75(10):4752-4760. Virosomes are discussed further in, for example, Gluck et al., Vaccine (2002) 20:B10 B16. Immunopotentiating reconstituted influenza virosomes (IRIV) are used as the subunit antigen delivery system in the intranasal trivalent INFLEXAL™ product {Mischler & Metcalfe (2002) Vaccine 20 Suppl 5:B17-23} and the INFLUVAC PLUS™ product.

[0338] E. Bacterial or Microbial Derivatives

[0339] Adjuvants suitable for use in the invention include bacterial or microbial derivatives such as:

[0340] (1) Non-Toxic Derivatives of Enterobacterial Lipopolysaccharide (LPS)

[0341] Such derivatives include Monophosphoryl lipid A (MPL) and 3-O-deacylated MPL (3dMPL). 3dMPL is a mixture of 3 De-O-acylated monophosphoryl lipid A with 4, 5 or 6 acylated chains. A preferred “small particle” form of 3 De-O-acylated monophosphoryl lipid A is disclosed in EP 0 689 454. Such “small particles” of 3dMPL are small enough to be sterile filtered through a 0.22 micron membrane (see EP 0 689 454). Other non-toxic LPS derivatives include monophosphoryl lipid A mimics, such as aminoalkyl glucosaminide phosphate derivatives e.g. RC 529. See Johnson et al. (1999) Bioorg Med Chem Lett 9:2273-2278.

[0342] (2) Lipid A Derivatives

[0343] Lipid A derivatives include derivatives of lipid A from Escherichia coli such as OM-174. OM-174 is described for example in Meraldi et al., Vaccine (2003) 21:2485-2491; and Pajak, et al., Vaccine (2003) 21:836-842.

[0344] (3) Immunostimulatory Oligonucleotides

[0345] Immunostimulatory oligonucleotides suitable for use as adjuvants in the invention include nucleotide sequences containing a CpG motif (a sequence containing an unmethylated cytosine followed by guanosine and linked by a phosphate bond). Bacterial double stranded RNA or oligonucleotides containing palindromic or poly(dG) sequences have also been shown to be immunostimulatory.

[0346] The CpGs can include nucleotide modifications/analogs such as phosphorothioate modifications and can be double-stranded or single-stranded. Optionally, the guanosine may be replaced with an analog such as 2′-deoxy-7-deazaguanosine. See Kandimalla, et al., Nucleic Acids Research (2003) 31(9): 2393-2400; WO02/26757 and WO99/62923 for examples of possible analog substitutions. The adjuvant effect of CpG oligonucleotides is further discussed in Krieg, Nature Medicine (2003) 9(7): 831-835; McCluskie, et al., FEMS Immunology and Medical Microbiology (2002) 32:179-185; WO98/40100; U.S. Pat. No. 6,207,646; U.S. Pat. No. 6,239,116 and U.S. Pat. No. 6,429,199.

[0347] The CpG sequence may be directed to TLR9, such as the motif GTCGTT or TTCGTT. See Kandimalla, et al., Biochemical Society Transactions (2003) 31 (part 3): 654-658. The CpG sequence may be specific for inducing a Th1 immune response, such as a CpG-A ODN, or it may be more specific for inducing a B cell response, such a CpG-B ODN. CpG-A and CpG-B ODNs are discussed in Blackwell, et al., J. Immunol. (2003) 170(8):4061-4068; Krieg, TRENDS in Immunology (2002) 23(2): 64-65 and WO01/95935. Preferably, the CpG is a CpG-A ODN.

[0348] Preferably, the CpG oligonucleotide is constructed so that the 5′ end is accessible for receptor recognition. Optionally, two CpG oligonucleotide sequences may be attached at their 3′ ends to form “immunomers”. See, for example, Kandimalla, et al., BBRC (2003) 306:948-953; Kandimalla, et al., Biochemical Society Transactions (2003) 31(part 3):664-658; Bhagat et al., BBRC (2003) 300:853-861 and WO03/035836.

[0349] (4) ADP-Ribosylating Toxins and Detoxified Derivatives Thereof.

[0350] Bacterial ADP-ribosylating toxins and detoxified derivatives thereof may be used as adjuvants in the invention. Preferably, the protein is derived from E. coli (i.e., E. coli heat labile enterotoxin “LT), cholera (“CT”), or pertussis (“PT”). The use of detoxified ADP-ribosylating toxins as mucosal adjuvants is described in WO95/17211 and as parenteral adjuvants in WO98/42375. Preferably, the adjuvant is a detoxified LT mutant such as LT-K63, LT-R72, and LTR192G. The use of ADP-ribosylating toxins and detoxified derivatives thereof, particularly LT-K63 and LT-R72, as adjuvants can be found in the following references: Beignon, et al., Infection and Immunity (2002) 70(6):3012-3019; Pizza, et al., Vaccine (2001) 19:2534-2541; Pizza, et al., Int. J. Med. Microbiol. (2000) 290(4-5) :455-461; Scharton-Kersten et al., Infection and Immunity (2000) 68(9):5306-5313; Ryan et al., Infection and Immunity (1999) 67(12):6270-6280; Partidos et al., Immunol. Lett. (1999) 67(3):209-216; Peppoloni et al., Vaccines (2003) 2(2):285-293; and Pine et al., (2002) J. Control Release (2002) 85(1-3):263-270. Numerical reference for amino acid substitutions is preferably based on the alignments of the A and B subunits of ADP-ribosylating toxins set forth in Domenighini et al., Mol. Microbiol. (1995) 15(6):1165-1167.

[0351] F. Bioadhesives and Mucoadhesives

[0352] Bioadhesives and mucoadhesives may also be used as adjuvants in the invention. Suitable bioadhesives include esterified hyaluronic acid microspheres (Singh et al. (2001) J. Cont. Rele. 70:267-276) or mucoadhesives such as cross-linked derivatives of polyacrylic acid, polyvinyl alcohol, polyvinyl pyrollidone, polysaccharides and carboxymethylcellulose. Chitosan and derivatives thereof may also be used as adjuvants in the invention. See WO99/27960.

[0353] G. Microparticles

[0354] Microparticles may also be used as adjuvants in the invention. Microparticles (i.e. a particle of ˜100 nm to ˜150 μm in diameter, more preferably ˜200 nm to ˜30 μm in diameter, and most preferably ˜500 nm to ˜10 μm in diameter) formed from materials that are biodegradable and non toxic (e.g. a poly(α-hydroxy acid), a polyhydroxybutyric acid, a polyorthoester, a polyanhydride, a polycaprolactone, etc.), with poly(lactide co glycolide) are preferred, optionally treated to have a negatively-charged surface (e.g. with SDS) or a positively-charged surface (e.g. with a cationic detergent, such as CTAB).

[0355] H. Liposomes

[0356] Examples of liposome formulations suitable for use as adjuvants are described in U.S. Pat. No. 6,090,406, U.S. Pat. No. 5,916,588, and EP 0 626 169.

[0357] I. Polyoxyethylene ether and Polyoxyethylene Ester Formulations

[0358] Adjuvants suitable for use in the invention include polyoxyethylene ethers and polyoxyethylene esters. WO99/52549. Such formulations further include polyoxyethylene sorbitan ester surfactants in combination with an octoxynol (WO01/21207) as well as polyoxyethylene alkyl ethers or ester surfactants in combination with at least one additional non-ionic surfactant such as an octoxynol (WO01/21152).

[0359] Preferred polyoxyethylene ethers are selected from the following group: polyoxyethylene-9-lauryl ether (laureth 9), polyoxyethylene-9-steoryl ether, polyoxytheylene-8-steoryl ether, polyoxyethylene-4-lauryl ether, polyoxyethylene-35-lauryl ether, and polyoxyethylene-23-lauryl ether.

[0360] J. Polyphosphazene (PCPP)

[0361] PCPP formulations are described, for example, in Andrianov et al., “Preparation of hydrogel microspheres by coacervation of aqueous polyphophazene solutions”, Biomaterials (1998) 19(1-3):109-115 and Payne et al., “Protein Release from Polyphosphazene Matrices”, Adv. Drug. Delivery Review (1998) 31(3):185-196.

[0362] K. Muramyl Peptides

[0363] Examples of muramyl peptides suitable for use as adjuvants in the invention include N-acetyl-muramyl-L-threonyl-D-isoglutamine (thr-MDP), N-acetyl-normuramyl-1-alanyl-d-isoglutamine (nor-MDP), and N acetylmuramyl-1-alanyl-d-isoglutaminyl-1-alanine-2-(1′-2′-dipalmitoyl-sn-glycero-3-hydroxyphosphoryloxy)-ethylamine MTP-PE).

[0364] L. Imidazoquinoline Compounds.

[0365] Examples of imidazoquinoline compounds suitable for use adjuvants in the invention include Imiquimod and its analogues, described further in Stanley, Clin Exp Dermatol (2002) 27(7):571-577; Jones, Curr Opin Investig Drugs (2003) 4(2):214-218; and U.S. Pat. Nos. 4,689,338, 5,389,640, 5,268,376, 4,929,624, 5,266,575, 5,352,784, 5,494,916, 5,482,936, 5,346,905, 5,395,937, 5,238,944, and 5,525,612.

[0366] M. Thiosemicarbazone Compounds.

[0367] Examples of thiosemicarbazone compounds, as well as methods of formulating, manufacturing, and screening for compounds all suitable for use as adjuvants in the invention include those described in WO04/60308. The thiosemicarbazones are particularly effective in the stimulation of human peripheral blood mononuclear cells for the production of cytokines, such as TNF-α.

[0368] N. Tryptanthrin Compounds.

[0369] Examples of tryptanthrin compounds, as well as methods of formulating, manufacturing, and screening for compounds all suitable for use as adjuvants in the invention include those described in WO04/64759. The tryptanthrin compounds are particularly effective in the stimulation of human peripheral blood mononuclear cells for the production of cytokines, such as TNF-α.

[0370] The invention may also comprise combinations of aspects of one or more of the adjuvants identified above. For example, the following adjuvant compositions may be used in the invention:
[0371] (1) a saponin and an oil-in-water emulsion (WO99/11241);
[0372] (2) a saponin (e.g., QS21)+a non-toxic LPS derivative (e.g. 3dMPL) (see WO94/00153);
[0373] (3) a saponin (e.g., QS21)+a non-toxic LPS derivative (e.g. 3dMPL)+a cholesterol;
[0374] (4) a saponin (e.g., QS21)+3dMPL+IL 12 (optionally+a sterol) (WO98/57659);
[0375] (5) combinations of 3dMPL with, for example, QS21 and/or oil-in-water emulsions (See European patent applications 0835318, 0735898 and 0761231);
[0376] (6) SAF, containing 10% Squalane, 0.4% Tween 80, 5% pluronic-block polymer L121, and thr-MDP, either microfluidized into a submicron emulsion or vortexed to generate a larger particle size emulsion.
[0377] (7) RIBI™ adjuvant system (RAS), (Ribi Immunochem) containing 2% Squalene, 0.2% Tween 80, and one or more bacterial cell wall components from the group consisting of monophosphorylipid A (MPL), trehalose dimycolate (TDM), and cell wall skeleton (CWS), preferably MPL+CWS (DETOX™); and
[0378] (8) one or more mineral salts (such as an aluminum salt)+a non-toxic derivative of LPS (such as 3dPML).
[0379] (9) one or more mineral salts (such as an aluminum salt)+an immunostimulatory oligonucleotide (such as a nucleotide sequence including a CpG motif).

[0380] O. Human Immunomodulators

[0381] Human immunomodulators suitable for use as adjuvants in the invention include cytokines, such as interleukins (e.g. IL-1, IL-2, IL-4, IL-5, IL-6, IL-7, IL-12, etc.), interferons (e.g. interferon-γ), macrophage colony stimulating factor, and tumor necrosis factor.

[0382] Aluminum salts and MF59 are preferred adjuvants for use with injectable influenza vaccines. Bacterial toxins and bioadhesives are preferred adjuvants for use with mucosally-delivered vaccines, such as nasal vaccines.

[0383] The contents of all of the above cited patents, patent applications and journal articles are incorporated by reference as if set forth fully herein.

### Therapeutic Methods

[0384] The invention provides methods for inducing or increasing an immune response to S. pyogenes using the compositions described above. The immune response is preferably protective and can include antibodies and/or cell-mediated immunity (including systemic and mucosal immunity). Immune responses include booster responses.

[0385] The combinations of GAS antigens, nucleic acid molecules or antibodies described above may be included in a single composition for simultaneous administration. Alternatively, the combinations of GAS antigens, nucleic acid molecules or antibodies may be administered sequentially. For example, where the combination comprises Spy0167, Spy0269, and Spy0416 or mutants or fragments thereof, these 3 antigens may be administered simultaneously in a single composition or sequentially in separate compositions. In this situation, the invention provides: Spy0167 for administration to an animal that has already received Spy0269 and/or Spy416; Spy0269 for administration to an animal that has already received Spy0167 and/or Spy0416; and Spy0416 for administration to an animal that has already received Spy0167 and/or Spy0269.

[0386] Teenagers and children, including toddles and infants, can receive a vaccine for prophylactic use; therapeutic vaccines typically are administered to teenagers or adults. A vaccine intended for children may also be administered to adults e.g., to assess safety, dosage, immunogenicity, etc.

[0387] Diseases caused by Streptococcus pyogenes which compositions of the invention can reduce the risk of, prevent, or treat include, but are not limited to, pharyngitis (such as streptococcal sore throat), scarlet fever, impetigo, erysipelas, cellulitis, septicemia, toxic shock syndrome, necrotizing fasciitis, and sequelae such as rheumatic fever and acute glomerulonephritis. The compositions may also be effective against other streptococcal bacteria, e.g., GBS.

[0388] Tests to Determine the Efficacy of the Immune Response

[0389] One way of assessing efficacy of therapeutic treatment involves monitoring GAS infection after administration of the composition of the invention. One way of assessing efficacy of prophylactic treatment involves monitoring immune responses against the GAS antigens in the compositions of the invention after administration of the composition.

[0390] Another way of assessing the immunogenicity of the component proteins of the immunogenic compositions of the present invention is to express the GAS antigens recombinantly and to screen patient sera or mucosal secretions by immunoblot. A positive reaction between the protein and the patient serum indicates that the patient has previously mounted an immune response to the protein in question; i.e., the protein is an immunogen. This method may also be used to identify immunodominant proteins and/or epitopes.

[0391] Another way of checking efficacy of therapeutic treatment involves monitoring GAS infection after administration of the compositions of the invention. One way of checking efficacy of prophylactic treatment involves monitoring immune responses both systemically (such as monitoring the level of IgG1 and IgG2a production) and mucosally (such as monitoring the level of IgA production) against GAS challenge after administration of the composition. Typically, serum specific antibody responses are determined post-immunization but pre-challenge whereas mucosal specific antibody body responses are determined post-immunization and post-challenge.

[0392] The vaccine compositions of the present invention can be evaluated in in vitro and in vivo animal models prior to host, e.g., human, administration. Particularly useful mouse models include those in which intraperitoneal immunization is followed by either intraperitoneal challenge or intranasal challenge.

[0393] The efficacy of immunogenic compositions of the invention can also be determined in vivo by immunizing animal models, (e.g., guinea pigs or mice) with the immunogenic compositions and ascertaining the level of protection obtained after challenge with GAS.

[0394] In vivo efficacy models include but are not limited to: (i) a murine infection model using human GAS serotypes; (ii) a murine disease model which is a murine model using a mouse-adapted GAS strain, such as the M23 strain which is particularly virulent in mice, and (iii) a primate model using human GAS isolates.

[0395] The immune response may be one or both of a TH1 immune response and a TH2 response. The immune response may be an improved or an enhanced or an altered immune response. The immune response may be one or both of a systemic and a mucosal immune response. Preferably the immune response is an enhanced system and/or mucosal response.

[0396] An enhanced systemic and/or mucosal immunity is reflected in an enhanced TH1 and/or TH2 immune response. Preferably, the enhanced immune response includes an increase in the production of IgG1 and/or IgG2a and/or IgA.

[0397] Preferably the mucosal immune response is a TH2 immune response. Preferably, the mucosal immune response includes an increase in the production of IgA.

[0398] Activated TH2 cells enhance antibody production and are therefore of value in responding to extracellular infections. Activated TH2 cells may secrete one or more of IL-4, IL-5, IL-6, and IL-10. A TH2 immune response may result in the production of IgG1, IgE, IgA and memory B cells for future protection.

[0399] A TH2 immune response may include one or more of an increase in one or more of the cytokines associated with a TH2 immune response (such as IL-4, IL-5, IL-6 and IL-10), or an increase in the production of IgG1, IgE, IgA and memory B cells. Preferably, the enhanced TH2 immune response will include an increase in IgG1 production.

[0400] A TH1 immune response may include one or more of an increase in CTLs, an increase in one or more of the cytokines associated with a TH1 immune response (such as IL-2, IFNγ, and TNFβ), an increase in activated macrophages, an increase in NK activity, or an increase in the production of IgG2a. Preferably, the enhanced TH1 immune response will include an increase in IgG2a production.

[0401] Immunogenic compositions of the invention may be used either alone or in combination with other GAS antigens optionally with an immunoregulatory agent capable of eliciting a Th1 and/or Th2 response.

[0402] The invention also comprises an immunogenic composition comprising one or more immunoregulatory agent, such as a mineral salt, such as an aluminium salt and an oligonucleotide containing a CpG motif Most preferably, the immunogenic composition includes both an aluminium salt and an oligonucleotide containing a CpG motif Alternatively, the immunogenic composition includes an ADP ribosylating toxin, such as a detoxified ADP ribosylating toxin and an oligonucleotide containing a CpG motif. Preferably, one or more of the immunoregulatory agents include an adjuvant. The adjuvant may be selected from one or more of the group consisting of a TH1 adjuvant and TH2 adjuvant.

[0403] The compositions of the invention will preferably elicit both a cell mediated immune response as well as a humoral immune response in order to effectively address a GAS infection. This immune response will preferably induce long lasting (e.g., neutralizing) antibodies and a cell mediated immunity that can quickly respond upon exposure to one or more GAS antigens.

[0404] In one particularly preferred embodiment, the immunogenic composition comprises one or more GAS antigens which elicit(s) a neutralizing antibody response and one or more GAS antigens which elicit(s) a cell mediated immune response. In this way, the neutralizing antibody response prevents or inhibits an initial GAS infection while the cell-mediated immune response capable of eliciting an enhanced Th1 cellular response prevents further spreading of the GAS infection.

[0405] Compositions of the invention will generally be administered directly to a patient. The compositions of the present invention may be administered, either alone or as part of a composition, via a variety of different routes. Certain routes may be favored for certain compositions, as resulting in the generation of a more effective immune response, preferably a CMI response, or as being less likely to induce side effects, or as being easier for administration.

[0406] Delivery methods include parenteral injection (e.g., subcutaneous, intraperitoneal, intravenous, intramuscular, or interstitial injection) and rectal, oral (e.g., tablet, spray), vaginal, topical, transdermal (e.g., see WO 99/27961), transcutaneous (e.g., see WO02/074244 and WO02/064162), intranasal (e.g., see WO03/028760), ocular, aural, and pulmonary or other mucosal administration.

[0407] By way of example, the compositions of the present invention may be administered via a systemic route or a mucosal route or a transdermal route or it may be administered directly into a specific tissue. As used herein, the term “systemic administration” includes but is not limited to any parenteral routes of administration. In particular, parenteral administration includes but is not limited to subcutaneous, intraperitoneal, intravenous, intraarterial, intramuscular, or intrasternal injection, intravenous, intraarterial, or kidney dialytic infusion techniques. Preferably, the systemic, parenteral administration is intramuscular injection. As used herein, the term “mucosal administration” includes but is not limited to oral, intranasal, intravaginal, intrarectal, intratracheal, intestinal and ophthalmic administration.

[0408] Dosage treatment can be a single dose schedule or a multiple dose schedule. Multiple doses may be used in a primary immunization schedule and/or in a booster immunization schedule. In a multiple dose schedule the various doses may be given by the same or different routes e.g., a parenteral prime and mucosal boost, a mucosal prime and parenteral boost, etc.

[0409] The compositions of the invention may be prepared in various forms. For example, a composition can be prepared as an injectable, either as a liquid solution or a suspension. Solid forms suitable for solution in, or suspension in, liquid vehicles prior to injection can also be prepared (e.g., a lyophilized composition). A composition can be prepared for oral administration, such as a tablet or capsule, as a spray, or as a syrup (optionally flavored). A composition can be prepared for pulmonary administration, e.g., as an inhaler, using a fine powder or a spray. A composition can be prepared as a suppository or pessary. A composition can be prepared for nasal, aural or ocular administration e.g., as drops. A composition can be in kit form, designed such that a combined composition is reconstituted just prior to administration to a patient. Such kits may comprise one or more mutant Spy0167 or other antigens in liquid form and one or more lyophilized antigens.

[0410] Immunogenic compositions used as vaccines comprise an immunologically effective amount of the GAS antigens or other antigens, as well as any other components, as needed, such as antibiotics. An “immunologically effective amount” is an amount which, when administered to an individual, either in a single dose or as part of a series, increases a measurable immune response or prevents or reduces a clinical symptom.

[0411] The immunogenic compositions of the present invention may be administered in combination with an antibiotic treatment regime. In one embodiment, the antibiotic is administered prior to administration of a composition of the invention. In another embodiment, the antibiotic is administered subsequent to the administration of a composition of the invention. Examples of antibiotics suitable for use in the treatment of a GAS infection include but are not limited to penicillin or a derivative thereof or clindamycin, cephalosporins, glycopeptides (e.g., vancomycin), and cycloserine.

[0412] The amount of active agents in a composition varies depending upon the health and physical condition of the individual to be treated, age, the taxonomic group of individual to be treated (e.g., non-human primate, primate, etc.), the capacity of the individual's immune system to synthesize antibodies, the degree of protection desired, the formulation of the vaccine, the treating doctor's assessment of the medical situation, and other relevant factors. The amount will fall in a relatively broad range which can be determined through routine trials.

### Kits

[0413] The invention also provides kits comprising one or more containers of compositions of the invention. Compositions can be in liquid form or can be lyophilized, as can individual antigens. Suitable containers for the compositions include, for example, bottles, vials, syringes, and test tubes. Containers can be formed from a variety of materials, including glass or plastic. A container may have a sterile access port (for example, the container may be an intravenous solution bag or a vial having a stopper pierceable by a hypodermic injection needle).

[0414] The kit can further comprise a second container comprising a pharmaceutically-acceptable buffer, such as phosphate-buffered saline, Ringer's solution, or dextrose solution. It can also contain other materials useful to the end-user, including other buffers, diluents, filters, needles, and syringes. The kit can also comprise a second or third container with another active agent, for example an antibiotic.

[0415] The kit can also comprise a package insert containing written instructions for methods of inducing immunity against S. pyogenes or for treating S. pyogenes infections. The package insert can be an unapproved draft package insert or can be a package insert approved by the Food and Drug Administration (FDA) or other regulatory body.

[0416] All patents, patent applications, and references cited in this disclosure are expressly incorporated herein by reference. The above disclosure generally describes the present invention. A more complete understanding can be obtained by reference to the following specific examples, which are provided for purposes of illustration only and are not intended to limit the scope of the invention.

### Example 1

### Hemolysis Assays

[0417] Serial dilutions of Spy0167 or a Spy0167 mutant are prepared in 96-well plates with U-shaped bottoms using PBS+0.5% BSA. One ml of sheep blood is washed three times in PBS (with centrifugation at 3000×g), and blood cells are suspended in 5 ml of PBS. An equal volume of suspension is added to 50 μl of each toxin dilution and incubated at 37° C. for 30 min. Triton (2%) in water is used to give 100% hemolysis, and PBS+0.5% BSA is used as negative control. Plates are then centrifuged for 5 min at 1,000×g, and the supernatant is transferred carefully to 96-well flat-bottomed plates. The absorbance is read at 540 nm. One hemolytic unit (HU) is defined as the amount of Spy0167 or Spy0167 mutant required to obtained 50% of maximum lysis obtained treating the blood cells with 2% Triton.

### Example 2

### Assessment of In Vivo Toxicity of Spy0167 Mutant Antigens

[0418] Intravenous injection of antigen. A solution of either wild-type or mutant Spy0167 antigen in PBS is diluted in a solution of PBS+2 mM DTT, then 100 ml is injected into the tail vein of a mouse. Mice are observed for 2-3 days. Injection of wild-type Spy0167 typically results in death within a few minutes.

[0419] In vivo lethality inhibition assay. For lethality inhibition mediated by immune sera, 10 μg/mouse of wild-type Spy0167 (a solution of 100 μg/ml in PBS, 2 mM DTT) are incubated for 20 minutes with rotation “end over end” at room temperature with either anti-Spy0167 serum or control serum (obtained from mice immunized with adjuvant alone). After incubation, the samples are inoculated in the mice by intravenous injection into the tail vein. Mice are observed for 2-3 days.

[0420] Acute in vivo toxicity. Acute in vivo toxicity is assessed using a dose of 10 μg/mouse of wild-type Spy0167 as a positive control and injection of Freund's adjuvant alone as a negative control. Ten μg/mouse of wild-type Spy0167 are incubated with either wild-type Spy0167 antiserum or with control serum and inoculated into mice as described above.

### Example 3

### Inactivation of Spy0416 Proteolytic Activity

[0421] SDS-PAGE. IL-8 is incubated with wild-type Spy0416 or a Spy0416 mutant. The incubation mixtures is loaded on SDS-PAGE and revealed by silver staining Wild-type Spy0416 releases two bands: 8 kDa (active form) and 6 kDa (inactive cleaved IL-8). A Spy0416 mutant releases only one band, which corresponds to uncleaved IL-8, as in the control reaction (without enzyme).

[0422] ELISA. IL-8 is incubated with wild-type Spy0416 or a Spy0416 mutant at three different concentrations, and the incubation mixtures are tested for the presence of uncleaved IL-8 using an antibody which is specific for the cytokine but which is unable to recognize the cleaved inactive form. The results are expressed as percentage of uncleaved IL-8 after 0, 8 and 24 h reactions, and were calculated as follows:

$$\frac{[ IL \text{-} 8 in the reaction mix ]}{[ IL \text{-} 8 in the control mix ]} \times 100 ,$$

where “control mix” is the reaction mix without the enzyme at time point 0.

### Example 4

### The Protective Capacity of GAS Antigens

[0423] A GAS antigen is used to immunize mice to test its capacity to confer protection against GAS lethal challenge. The antigen is administered intraperitoneally, optionally with an adjuvant, at days 0, 21, and 35. Blood samples are taken two weeks after the third immunization. The mice are then challenged intranasally with a GAS strain (e.g., 10⁸ cfu of GAS strain 3348 M1 in 50 μl). Survival is monitored for a 10-14 day period.

### Example 5

### Dose-Dependent Inhibition of Spy0416-Mediated IL-8 Cleavage by Spy0416 Antibodies

[0424] Antisera specific for Spy0416, wild type and inactive mutants, are produced by immunizing CD1 mice with purified recombinant proteins. IL-8 (10 μg/ml) is incubated with wild-type Spy0416 with or without Spy0416 antiserum (1:50 and 1:5000), or with monoclonal antibodies raised against wild-type Spy0416, in two different conditions: (1) 8 hour incubation, 0.1 μg/ml of Spy0416 and (2) 24 hour incubation, 0.05 μg/ml of Spy0416. The incubation mixtures are then tested for the presence of uncleaved IL-8 by ELISA. The results demonstrate a dose-dependent inhibition of Spy0416-mediated IL-8 cleavage by the Spy0416 antiserum or monoclonal antibodies.

### Example 6

### Inhibition of Spy0167 Hemolysis by Antibodies Against Wild-Type or Mutant Spy0167 (Spy0167)

[0425] Using 50 ng/ml (3.5 HU) of toxin, the antibody titer required to obtain 50% reduction of Spy0167 hemolytic activity is tested using an adjuvant (e.g., Freund's adjuvant, Alum, or MF59™). Adjuvant alone is used as a negative control.

### Example 7

### Protective Capacity of the Combination of GAS Antigens in a Subcutaneous Challenge Model

[0426] Mice were immunized with single GAS antigens (Spy0167, Spy0416, or Spy0269) or with combinations of GAS antigens GAS (Spy0167+Spy0416+Spy0269; or Spy0416+Spy0269). The mice were then infected subcutaneously with the SF370 M1 strain of GAS, which causes skin lesions. The protective effect of the GAS antigens or antigen combinations was determined by measuring lesion size.

[0427] In this model, there is a synergistic protective effect obtained by using the combination of Spy0167+Spy0416+Spy0269 or the combination of Spy0416+Spy0269 compared with the protective effect obtained by using any of these GAS antigens alone. In fact, the protective effect provided by the combinations tested is comparable to that provided using GAS M1 protein. See FIG. 1.

### Example 8

### Protective Capacity of the Combination of Mutant GAS Antigens

[0428] The protective capacity of a combination of GAS mutant antigens (Spy0167 mutant antigen P427L/W535F and Spy0416 mutant antigen D151A/S617A) against intranasal challenge with various strains of GAS was tested essentially as described in Example 4. The results are shown in Table 2.

TABLE 2

| challenge | percent survival | | | no. mice |
|---|---|---|---|---|
| strain | negative control | combination | adjuvant | tested/vaccine |
| M1 | 19 | 85 | alum | 128 |
| M2 | 15 | 40 | alum | 32 |
| M6 | 25 | 58 | alum | 80 |
| M12 | 19 | 47 | alum | 144 |
| M23 | 19 | 54 | Freund's | 60 |

### Example 9

### Preparation of Spy0416 Mutants

[0429] By comparison with C5a protease, three amino acids in the Spy0416 were identified that putatively constitute the catalytic site of the protease: D151, H279 and 5617. In order to obtain an inactive form of the enzyme, nucleotide substitutions resulting in amino acid changes D151A and/or S617A were introduced in the Spy0416 coding sequence by Splicing by Overlapping Extension PCR (SOE-PCR).

[0430] Substitution D151A

[0431] Three PCR reactions were carried out:

| PCR reaction | Template | Primers |
|---|---|---|
| PCR1 (360 bps) | genomic SF370 | 57F, |
| | | GTGCGT [symbol] GCAGATG |
| | | AGCTAAGCA; |
| | | SEQ ID NO: 150 |
| | | 57mutDR1, |
| | | CCCTGTGGCAATAACTGCGAC; |
| | | SEQ ID NO: 151 |
| PCR2 (910 bp) | genomic SF370 | 57mutDF1, |
| | | cgCAGTTATTGcCACAGGGAT, |
| | | SEQ ID NO: 152 |
| | | 57mutSalR, |
| | | CTGACTGA [symbol] AGACTCT |
| | | GAATAGATG, |
| | | SEQ ID NO: 153 |
| PCR3 | PCR1, PCR2 | 57F |
| (1270 bps) | | 57mutSalR |

[0432] PCR product 3 was then digested with Nde-Sal and introduced in pET21_{—}57his digested with the same enzymes. Clones containing the correct in-frame substitutions (pET21_{—}57his_D151A) were selected by DNA sequencing.

[0433] Substitution S617A

[0434] Three PCR reactions were carried out:

| PCR reaction | Template | Primers |
|---|---|---|
| PCR4 (517 bp) | genomic SF370 | 57mutSalF, |
| | | CTGACTGA [symbol] TTTAAAGA |
| | | CATAAAAGATAG; |
| | | SEQ ID NO: 154 |
| | | 57mutSR1, |
| | | GAGAGGCCATAGCTGTTCCTG; |
| | | SEQ ID NO: 155 |
| PCR6 | genomic SF370 | 57mutSF1, |
| (4740 bp) | | GGAACAGCTATGGCCTCTCCT; |
| | | SEQ ID NO: 156 |
| | | 57R |
| PCR6 | PCR4, PCR5 | 57FmutSalF |
| (5257 bp) | | 57R |

[0435] PCR product 6 was then digested with Sal-Xho and introduced in pET21_{—}57his digested with the same enzymes. Clones containing the correct in-frame substitutions (pET21_{—}57his_S617A) were selected by DNA sequencing.

[0436] Substitution D151A+S617A

[0437] PCR product 6 was digested Sal-Xho and introduced in pET21_{—}57his_D151A digested with the same enzymes. Clones containing the correct in-frame substitutions (pET21_{—}57his_D151A+S617A) were selected by DNA sequencing.

[0438] The single and double mutant proteins were expressed and purified using three chromatographic steps: ion exchange chromatography (Q Sepharose HP), hydroxylapatite chromatography and gel filtration chromatography.

### Example 10

### Point Mutation D151A Results in Inactivation of Spy0416 Proteolytic Activity

[0439] Spy0416 mutant D151A was expressed as a recombinant His-tagged protein. Two types of assays demonstrated that this mutant has lost the ability to cleave IL-8.

[0440] SDS-PAGE

[0441] IL-8 was incubated with wild-type Spy0416 or the Spy0416 mutant D151A. The incubation mixtures were loaded on SDS-PAGE and revealed by silver staining. The results are shown in FIG. 12. Wild-type Spy0416 (lanes 2 and 3) released two bands: 8 kDa (active form) and 6 kDa (inactive cleaved IL-8). In contrast, the Spy0416 D151A mutant released only one band, which corresponded to uncleaved IL-8, as in the control reaction (without enzyme).

[0442] ELISA

[0443] IL-8 was incubated with wild-type Spy0416 or the Spy0416 mutant D151A at three different concentrations, and the incubation mixtures were tested for the presence of uncleaved IL-8 using an antibody which is specific for the cytokine but which is unable to recognize the cleaved inactive form. The results are shown in FIG. 4, expressed as percentage of uncleaved IL-8 after 0, 8 and 24 h reactions, and were calculated as follows:

$$\frac{[ IL \text{-} 8 in the reaction mix ]}{[ IL \text{-} 8 in the control mix ]} \times 100 ,$$

where “control mix” is the reaction mix without the enzyme at time point 0.

[0444] As shown in FIG. 3, wild-type Spy0416 almost completely inactivated IL-8 after 8 hours, even at the lower concentration, while no inactivation was observed for IL-8 treated with the mutant enzyme.

### Example 11

### Spy0416 Mutant 5617A and Spy0416 Double Mutant D151A+5617A do not Cleave IL-8

[0445] Spy0416 mutant S617A and Spy0416 double mutant D151A+S617A were expressed as His-tagged proteins and were tested in IL-8 inactivation experiments as described in Example 2.

[0446] SDS-PAGE

[0447] IL-8 was incubated with either wild-type Spy0416 (His-tagged or tag-less), or each of the Spy0416 mutants D151A, S617A and D151AS+S617A for 24 hours. The incubation mixtures were loaded on an SDS-polyacrylamide gel and revealed by silver staining. The results of two experiments are shown in FIGS. 4A and 4B. Both the Spy0416 S617A mutant and the GAS D151+S617A mutant are unable to cleave IL-8, even at a 100-fold higher concentration than wild-type Spy0416.

[0448] ELISA

[0449] The same samples were used to perform an ELISA assay which confirmed that the single and double amino acid substitutions eliminate the ability of Spy0416 to cleave IL-8. The results, which are shown in FIG. 5, demonstrate that the mutants release 100% of uncleaved IL-8 after 24 h incubation, compared to 20-40% released by wild-type Spy0416.

### Example 12

### The Protective Capacity of Spy0416 Mutants is Similar to that Obtained with Wild-Type Spy0416

[0450] The Spy0416 mutants D151A and D151A+S617A were used to immunize mice to test their capacity to confer protection against GAS lethal challenge in comparison to wild-type Spy0416. The results of two experiments (20 mice each) are summarized below and expressed as average % survival.

TABLE 3

| | NO. MICE | NO. DEAD | % SURVIVAL |
|---|---|---|---|
| PBS + Freund | 40 | 26 | 35 |
| 192 M1 + Freund | 20 | 0 | 100 |
| 57 WT + Freund | 40 | 12 | 70 |
| 57 D151A + Freund | 40 | 6 | 85 |
| 57 D151A-S617A + Freund | 40 | 9 | 78 |

### Example 13

### Purified Inactive Mutants Appear as a Single Peptide Compared to Wild-Type Spy0416, which Exists Only in the Form of Two Non Covalently Associated Protein Fragments

[0451] Wild-type Spy0416 is obtained mainly in the form of two fragments, one of about 23 kDa and a one of 150 kDa. The two fragments are not separated in Ni-chelating affinity purification or by gel filtration, but appear as two different bands on SDS-PAGE (FIG. 6). N-terminal sequencing confirmed that the 23 kDa fragment is the N-terminal portion of Spy0416 (amino acids 34-244 of SEQ ID NO:50) while the 150 kDa fragment is the C-terminal region (amino acids 245-1603 of SEQ ID NO:50).

[0452] In contrast to wild-type Spy0416, Spy0416 mutants of the invention are obtained as proteins of higher molecular weight (174 kDa), and the 23 kDa band is absent (see FIG. 7, which shows the results of an experiment in which partially purified wild-type Spy0416 and Spy0416 mutants were loaded on SDS-polyacrylamide gels).

### Example 14

### Dose-Dependent Inhibition of Spy0416-Mediated IL-8 Cleavage by Polyclonal Antisera

[0453] Mouse antisera specific for Spy0416, wild type and inactive mutants, were produced by immunizing CD1 mice with the purified recombinant proteins.

[0454] IL-8 (10 μg/ml) was incubated with wild-type Spy0416 with or without Spy0416 antiserum (1:50 and 1:5000) in two different conditions: (1) 8 hour incubation, 0.1 μg/ml of Spy0416 and (2) 24 hour incubation, 0.05 μg/ml of Spy0416. The incubation mixtures were then tested for the presence of uncleaved IL-8 by ELISA. The results shown in FIGS. 8A and 8B demonstrated a dose-dependent inhibition of Spy0416-mediated IL-8 cleavage by the mouse antiserum.

### Example 15

### Cloning of Wild-Type and Mutant Spy0167 Proteins

[0455] Genes encoding wild-type and mutant Spy0167 proteins were amplified by PCR using the primers from the SF370 genome shown in Table 4.

[0456] The PCR products were digested with NheI-XhoI and ligated with pet24b+ (Novagen) vector cut with the same enzymes. E. coli DH5a electrocompetent cells were transformed with the ligation reactions. LBPTK medium was added and, after incubation for 1 h at 37° C., with agitation at 250 rpm, bacteria were plated onto LBPTK plates containing 50 μg/ml kanamycin. Positive colonies were identified by colony PCR.

[0457] Plasmids from positive colonies were prepared from an overnight culture in LBPTK medium containing 50 μg/ml kanamycin and analyzed by DNA sequencing, which confirmed the expected insert gene under the T7 polymerase promoter. The final DNA and protein sequences of the cloned genes are shown in the sequence listing. See Table 5.

TABLE 4

| gene | primers |
|---|---|
| Spy0167 wild- | 25F NheI, |
| type tag-less | GTGCGTGCTAGCGAATCGAACAAACAAAACACTGC |
| | (SEQ ID NO: 157) |
| | 25rev = |
| | GCATTCGATCCTCGAGCTACTTATAAGTAATCGAAC |
| | CATATG |
| | (SEQ ID NO: 158) |
| Spy0167 P427L | External primers: |
| tag-less | 25F NheI, |
| | GTGCGTGCTAGCGAATCGAACAAACAAAACACTGC |
| | (SEQ ID NO: 157) |
| | 25rev, |
| | GCATTCGATCCTCGAGCTACTTATAAGTAATCGAAC |
| | CATATG |
| | (SEQ ID NO: 158) |
| | Internal primers: |
| | PL427_for, |
| | GCTACCTTCAGTAGAAAAAACCTAGCTTATCCTATT |
| | TCATACACC |
| | (SEQ ID NO: 159) |
| | PL427_rev, |
| | GGTGTATGAAATAGGATAAGCTAGGTTTTTTCTACT |
| | GAAGGTAGC |
| | (SEQ ID NO: 160) |
| Spy0167 Wild | 25F NheI, |
| Type His- | GTGCGTGCTAGCGAATCGAACAAACAAAACACTGC |
| tagged | (SEQ ID NO: 157) |
| | GTGCGTGCTAGCGAATCGAACAAACAAAACACTGC |
| | (SEQ ID NO: 161) |
| Spy0167 W535F | External primers: |
| His- | 25F NheI, |
| tagged | GTGCGTGCTAGCGAATCGAACAAACAAAACACTGC |
| | (SEQ ID NO: 157) |
| | 25revhis, |
| | GCATTCGATCCTCGAGCTTATAAGTAATCGAACCAT |
| | ATGGG |
| | Internal primers: |
| | (SEQ ID NO: 161) |
| | WF535_for, |
| | GAGTGCACTGGCTTAGCTTTCGAATGGTGGCGAAAA |
| | GTGATC |
| | (SEQ ID NO: 162) |
| | WF535_rev, |
| | GATCACTTTTCGCCACCATTCGAAAGCTAAGCCAGT |
| | GCACTC |
| | (SEQ ID NO: 163) |
| Spy0167 | External primers: |
| W535F-D482N | 25F NheI, |
| His-tagged | GTGCGTGCTAGCGAATCGAACAAACAAAACACTGC |
| | (SEQ ID NO: 157) |
| | 25revhis, |
| | GCATTCGATCCTCGAGCTTATAAGTAATCGAACCAT |
| | ATGGG |
| | (SEQ ID NO: 161) |
| | Internal primers: |
| | WF535_for, |
| | GAGTGCACTGGCTTAGCTTTCGAATGGTGGCGAAAA |
| | GTGATC |
| | (SEQ ID NO: 162) |
| | WF535_rev, |
| | GATCACTTTTCGCCACCATTCGAAAGCTAAGCCAGT |
| | GCACTC |
| | (SEQ ID NO: 163) |
| | and |
| | DN482_for, |
| | GTTGCTCAATATGAAATCCTTTGGAATGAAATCAAT |
| | TATGATGACAAAGGAAAAG |
| | (SEQ ID NO: 164) |
| | DN482_rev, |
| | CTTTTCCTTTGTCATCATAATTGATTTCATTCCAAA |
| | GGATTTCATATTGAGCAAC |
| | (SEQ ID NO: 165) |
| Spy0167 | External primers: |
| C530G His- | 25F NheI, |
| tagged | GTGCGTGCTAGCGAATCGAACAAACAAAACACTGC |
| | (SEQ ID NO: 157) |
| | 25revhis, |
| | GCATTCGATCCTCGAGCTTATAAGTAATCGAACCAT |
| | ATGGG |
| | (SEQ ID NO: 161) |
| | Internal primers: |
| | CG530_for, |
| | CCGTATCATGGCTAGAGAGGGCACTGGCTTAGCTTG |
| | GGAATG |
| | (SEQ ID NO: 166) |
| | CG530_rev, |
| | CATTCCCAAGCTAAGCCAGTGCCCTCTCTAGCCATG |
| | ATACGG |
| | (SEQ ID NO: 167) |
| Spy0167 P427L | External primers: |
| His-tagged | 25F NheI, |
| | GTGCGTGCTAGCGAATCGAACAAACAAAACACTGC |
| | (SEQ ID NO: 157) |
| | 25 revhis, |
| | GCATTCGATCCTCGAGCTTATAAGTAATCGAACCAT |
| | ATGGG |
| | (SEQ ID NO: 161) |
| | Internal primers: |
| | PL427_for, |
| | GCTACCTTCAGTAGAAAAAACCTAGCTTATCCTATT |
| | TCATACACC |
| | (SEQ ID NO: 149) |
| | PL427_rev, |
| | GGTGTATGAAATAGGATAAGCTAGGTTTTTTCTACT |
| | GAAGGTAGC |
| | (SEQ ID NO: 150) |
| Spy0167 | External primers: |
| P427L-2535F- | 25_F, |
| C535G tag-less | GTGCGTGCTAGCGAATCGAACAAACAAAAC |
| | (SEQ ID NO: 168) |
| | 25_stopR, |
| | GCGTCTCGAGTCACTTATAAGTAATCGAACCATA |
| | (SEQ ID NO: 17450) |
| | Internal primers: |
| | W-C_for, |
| | CCGTATCATGGCTAGAGAGGGCACTGGCTTAGCTTT |
| | CGAATG |
| | (SEQ ID NO: 170) |
| | W-C_rev, |
| | CATTCGAAAGCTAAGCCAGTGCCCTCTCTAGCCATG |
| | ATACGG |
| | (SEQ ID NO: 171) |
| Spy0167 | External primers: |
| P427L-W535F | 25_F, |
| tag-less | GTGCGTGCTAGCGAATCGAACAAACAAAAC |
| | (SEQ ID NO: 168) |
| | 25_stopR, |
| | GCGTCTCGAGTCACTTATAAGTAATCGAACCATA |
| | (SEQ ID NO: 169) |
| | Internal primers: |
| | WF535_for, |
| | GAGTGCACTGGCTTAGCTTTCGAATGGTGGCGAAAA |
| | GTGATC |
| | (SEQ ID NO: 162) |
| | WF535_rev, |
| | GATCACTTTTCGCCACCATTCGAAAGCTAAGCCAGT |
| | GCACTC |
| | (SEQ ID NO: 163) |
| Spy0167 | External primers: |
| P427L-C530G | 25_F, |
| tag-less | GTGCGTGCTAGCGAATCGAACAAACAAAAC |
| | (SEQ ID NO: 168) |
| | 25_stopR, |
| | GCGTCTCGAGTCACTTATAAGTAATCGAACCATA |
| | (SEQ ID NO: 169) |
| | Internal primers: |
| | CG530_for, |
| | CCGTATCATGGCTAGAGAGGGCACTGGCTTAGCTTG |
| | GGAATG |
| | (SEQ ID NO: 166) |
| | CG530_rev, |
| | CATTCCCAAGCTAAGCCAGTGCCCTCTCTAGCCATG |
| | ATACGG |
| | (SEQ ID NO: 167) |
| Spy0167 | External primers: |
| ΔA248 | 25F NheI, |
| his-tagged | GTGCGTGCTAGCGAATCGAACAAACAAAACACTGC |
| | (SEQ ID NO: 157) |
| | 25revhis, |
| | GCATTCGATCCTCGAGCTTATAAGTAATCGAACCAT |
| | ATGGG |
| | (SEQ ID NO: 161) |
| | Internal primers: |
| | Δ248for, |
| | CTGGTGGTAATACGCTTCCTAGAACACAATATACTG |
| | AATCAATGG |
| | (SEQ ID NO: 172) |
| | Δ248rev, |
| | CCATTGATTCAGTATATTGTGTTCTAGGAAGCGTAT |
| | TACCACCAG |
| | (SEQ ID NO: 173) |

TABLE 5

| | sequence identifier | | | |
|---|---|---|---|---|
| | amino acid | | nucleotide | |
| Spy0167 gene | tag-less | His-tagged | tag-less | His-tagged |
| wild-type | 1-12 | 13 | 28 | 14 |
| P427L | 20 | 15 | 29 | 57 |
| C530G | 22 | 16 | 31 | 58 |
| W535F | 21 | 18 | 30 | 52 |
| ΔA248 | 23 | 17 | | 59 |
| W535F + D482N | 24 | 19 | | 53 |
| P427L + C530G | 26 | 54 | 33 | |
| P427L + W535F | 25 | 55 | 32 | |
| P427L + C530G + W535F | 27 | 56 | 34 | |

[0458] E. coli BL21(DE3) (Novagen) competent cells were transformed with the correct construct. LBPTK medium was added and, after incubation for 1 h at 37° C., with agitation at 250 rpm, bacteria were plated onto LBPTK plates containing 50 μg/ml kanamycin. BL21(DE3) pet24b+Spy0167 wild-type tag-less cells were grown at 25° C. and induced with 1 mM IPTG. Clone expression was verified by SDS PAGE (tag-less, FIGS. 15A and 15B; His-tagged, FIG. 16).

### Example 16

### Purification of His-Tagged Proteins

[0459] E. coli pellets were suspended in lysis buffer and mixed for 30-40 minutes at room temperature. Lysates were centrifuged at 30-40000×g for 20-25 minutes and supernatants were loaded onto wash buffer A equilibrated columns (Poly-Prep with 1 ml of Ni-Activated Chelating Sepharose Fast Flow resin). The loaded resin was washed three times with wash buffer A and three times with wash buffer B. Proteins were eluted with elution buffer in Eppendorf tubes containing 2 mM final of DTT. Total elution proteins are quantified with Bradford reagent and then analyzed by SDS-polyacrylamide gel electrophoresis (FIGS. 15 and 16).

[0460] Buffers

lysis buffer:
[0461] 10 ml B-PER™ (Bacterial-Protein Extraction Reagent, Pierce cat. 78266)
[0462] MgCl₂ final concentration of 0.1 mM
[0463] DNAsi I (Sigma cat. D-4263) 100 units
[0464] lysozyme (Sigma cat. L-7651) final concentration of 1 mg/ml
   wash buffer A: 50 mM NaH₂PO₄, 300 mM NaCl, pH 8.0
   wash buffer B: 20 mM imidazole, 50 mM NaH₂PO₄, 300 mM NaCl, pH 8.0
   elution buffer: 250 mM imidazole, 50 mM NaH₂PO₄, 300 mM NaCl, pH 8.0

### Example 17

### Purification of Tag-Less Proteins

[0465] Lysate Preparation

[0466] About 80-110g of bacterial culture pellet were suspended in 200-280 ml B-PER™ reagent (Pierce) supplemented with 6 tablets of COMPLETE® protease inhibitor, 10 ml 0.2M EDTA pH 7.5 (5 mM final concentration), 10 ml of a 100 mg/ml lysozyme solution, 8 ml of a 10000 K units/ml DNAse I solution and 1 ml of 50 mM MgCl₂ solution. Bacterial lysis was achieved by shaking the bacterial suspension for 60 minutes until a homogeneous suspension was obtained.

[0467] Following centrifugation for 60 minutes at 13000 rpm (25400×g), the supernatant was filtered using a 0.22 μm filter and is diluted with H₂O until a 1.8-1.9 mS conductivity was obtained. The pH was adjusted to 8.0. Protein concentration was determined by the Bradford method.

[0468] Anionic Exchange Chromatography

[0469] The supernatant derived from the lysate treated as described above was loaded on an HP 50/10 Q Sepharose column (−200 ml), previously equilibrated with 30 mM TRIS, pH 8.0. The flow-through was collected. Fractions containing the Spy0167 protein were pooled and dialyzed against 10 mM Na phosphate, pH 6.8. Protein concentration was determined by the Bradford method.
[0470] Buffer A: 30 mM TRIS, pH 8.0
[0471] Buffer B: 30 mM TRIS, 1M NaCl, pH 8.0
[0472] Equilibrium and Loading: 0% B
[0473] Gradient: 0-25% B in 5 CV−25% B 2 CV
[0474] Wash: 100% B 2 CV+3 CV
[0475] Flux: 20 ml/min
[0476] Fraction volume: 14 ml

[0477] Hydroxylapatite Chromatography

[0478] The previously obtained pool was loaded on a CHT20 column previously equilibrated with 10 mM Na-phosphate, pH 6.8. The flow through was collected.
[0479] Buffer A: 10 mM Na-phosphate, pH 6.8
[0480] Buffer B: 500 mM Na phosphate, pH 6.8
[0481] Wash: 8 CV
[0482] Wash: 30% B 6 CV
[0483] Gradient: 30-100% B (10 CV)
[0484] Wash: 100% B
[0485] Flux: 5 ml/min.
[0486] Fraction volume: 5 ml

[0487] Fraction aliquots were loaded on 12% Criterion gels under reducing and non-reducing conditions. Fractions containing Spy0167 protein were pooled and protein concentration was determined by Bradford method.

[0488] Gel Filtration Chromatography

[0489] The collected pool was concentrated using an Amicon filter in order to get a volume <10 ml. The concentrated material was loaded on a HiLoad Superdex 200 26/60 equilibrated with at least 3-4 column volumes of PBS.
[0490] Buffer: PBS
[0491] Elution: Isocratic
[0492] Flux: 2.5 ml/min.
[0493] Fraction volume: 5 ml

[0494] Fractions containing Spy0167 protein were pooled and protein concentration was determined by Bradford. An additional estimation of protein concentration was performed by UV measurement considering Abs 0.1% (=1 g/l) 1.119. Protein purity is analyzed by polyacrylamide gel electrophoresis (FIG. 18).

### Example 18

### Hemolytic Assays

[0495] Protocol for Quantitative Hemolytic Assay

[0496] Serial dilutions of toxin were prepared in 96-well plates with U-shaped bottoms using PBS+0.5% BSA. One ml of sheep blood was washed three times in PBS (with centrifugation at 3000×g), and blood cells were suspended in 5 ml of PBS. An equal volume of suspension was added to 50 μl of each toxin dilution and incubated at 37° C. for 30 min. Triton (2%) in water was used to give 100% hemolysis, and PBS+0.5% BSA was used as negative control. Plates were then centrifuged for 5 min at 1,000×g, and the supernatant was transferred carefully to 96-well flat-bottomed plates. The absorbance was read at 540 nm.

[0497] Comparison of E. coli Extracts Containing Wild-Type Spy0167 and Spy0167 Mutant P427L

[0498] The gene encoding Spy0167 P427L was amplified using PCR from the SF370 M1 genome and cloned into the vector pET21b+, which allowed expression in E. coli BL21DE3 of the His-tagged protein. Soluble extracts of E. coli expressing similar amounts of the wild-type and mutated streptolysin O proteins (see FIG. 12) were used to perform a hemolytic assay to compare the cytolytic properties of the two antigens. The result of the assay is shown in FIG. 9, which demonstrates that the mutated protein is at least 100 times less toxic than wild-type.

[0499] Comparison of Purified Wild-Type Spy0167 and Spy0167 Mutant P427L

[0500] The Spy0167 P427L mutant was purified according to purification standard procedures for His-tagged recombinant proteins (FIG. 10). Different concentrations of the purified wt and mutated proteins were used to repeat the hemolytic assay, which confirmed the decreased cytolytic activity (FIG. 11).

[0501] Hemolytic Activity of E. coli Extracts Containing His-Tagged and Tag-Less Wild-Type Spy0167 and Spy0167 Mutant P427L

[0502] We compared the hemolytic activity of E. coli lysates transformed with wild-type recombinant Spy0167 (rSpy0167) without a His tag (BL21 DE3, Novagen No. 71382-pET24) and P427L mutant rSpy0167 without a His tag (BL21 DE3, Novagen No. 71382-pET24). E. coli BL21 DE3 (Novagen, No. 71382) transformed with pET24 without insert was used as a negative control. The positive control was a hypotonic solution containing Triton 2% in water. The negative control was the protein dilution buffer (PBS containing 0.5% BSA, pH 7.4).

[0503] Hemolysis was determined by measuring absorbance at 540 nm (A₅₄₀ₙₘ) of the supernatants. The titer was calculated as the dilution with 50% of maximum A₅₄₀ₙₘ.

[0504] Results are shown in Tables 6 and 7 and in FIG. 13. These data demonstrate that, under the same conditions, mutant P427L is 1000 times less hemolytic than wild type Spy0167.

TABLE 6

| E. coli | CFU/ml |
|---|---|
| negative control | 3.9 × 10⁸ |
| Wild-type rSpy0167 (tag-less) | 1.2 × 10⁹ |
| P427L rSpy0167 (tag-less) | 1.03 × 10⁹ |

TABLE 7

| | rSpy0167 | rSpy0167P427L tag- |
|---|---|---|
| | wild-type tag-less | less |
| titer (OD = 50% hemolysis) | 50,000 | 48 |
| titer Wt/P427L | 1042 | |

[0505] Comparison of Wild-Type Spy0167 and Various Spy0167 Mutants

[0506] Hemolytic activity of wild-type Spy0167 was compared with hemolytic activity of several different Spy0167 mutants. The results are shown in FIG. 20 and in Table 8, below. One hemolytic unit (HU) is defined as the amount of toxin required to obtained 50% of maximum lysis obtained treating the blood cells with 2% Triton.

TABLE 8

| Protein | HU/mg | HU/mg-Spy0167/mutants |
|---|---|---|
| rSpy0167 WT | 22760 | 1 |
| C530G | 620 | 37 |
| W535F | 160 | 146 |
| W535F-D482N | <<20 | >>1000 |
| P427L | about 20 | about 1000 |
| Δala248 | <<20 | >>1000 |
| Neg. Control | <<20 | >>1000 |

[0507] Due to differences in protein purity, the hemolysis units/mg of mutants indicated in bold are overestimated; however, it is clear that (1) mutant W535F is less hemolytic than mutant C530G; (2) mutant P427L is about 1000 times less hemolytic than wild type and about 6-25 times less hemolytic than other two mutants W535F and C530G; and (3) mutant Δ248 is certainly less hemolytic than wild type).

[0508] Effect of Cholesterol

[0509] Two-fivefold serial dilutions in PBS-BSA 0.5% of E. coli lysates or E. coli lysate with 200 mg/ml of cholesterol obtained after cells' growing at 30° C. and induction with 1 mM IPTG at 25° C. and OD₆₀₀ₙₘ about 0.4-0.6, were assayed for their haemolytic activity. Fifty microliters of a 2% sheep erythrocyte solution in PBS were treated with an equal volume of protein preparations obtained by lysing bacteria, 3 hours after induction, with lysis buffer (B-PER solution-PIERCE-1 mM MgCl₂, 100K units/ml DNAse (Sigma) and lysozyme (Sigma) for 30-40 minutes. The insoluble fraction was then centrifuged (15 minutes, 21000×g, 4° C.), and the supernatant (E. coli lysate) was transferred to a new Eppendorf tube containing DTT at final concentration of 5 mM.

[0510] Under this condition, cholesterol did not inhibit either wild-type or mutant Spy0167 until a 100-fold dilution factor was used; thus, there was no effect on the mutant-induced lysis. In contrast, wild-type-induced lysis was greatly reduced. Lysis induced by the negative control was not influenced by cholesterol, which suggests that cholesterol-induced inhibition is specific. See Table 9 and FIG. 14.

TABLE 9

| | rSpy0167 wild-type tag- | rSpy0167 P427L |
|---|---|---|
| | less | tag-less |
| titer (OD = 50% hemolysis) | 400 | 40 |
| titre Wt/P427L | 10 | |

### Example 19

### Inhibition of Hemolysis

[0511] Protocol

[0512] Serial two-fold dilutions of sera from mice immunized with wild-type or mutant Spy0167 proteins (without adjuvants or with Alum or MF59™ as adjuvants) were prepared in 96-well plates with U-shaped bottoms using PBS+0.5% BSA. Sera of mice immunized with PBS or with adjuvant alone, as appropriate, were used as negative controls. An equal volume of a 50-100 ng/ml (3.5-7 HU) toxin solution in PBS+0.5% BSA was added, and the plates were incubated at room temperature for 20 minutes under agitation (800 rpm). After incubation, 50 ml of this solution were transferred to a new 96-well plate, and an equal volume of a sheep red blood cell suspension (washed 3× in PBS) was added and incubated at 37° C. for 30 min. Plates were then centrifuged for 1 min at 1,000×g, the supernatant was carefully transferred to 96-well flat-bottomed plates, and the absorbance was read at 540 nm. In the results described below, inhibition titer is expressed as the sera dilution that reduced Triton-induced hemolysis by 50%.

[0513] Inhibition of Spy0167 Hemolysis by Wild-Type Spy0167 Antisera

[0514] Inhibition of Spy0167 hemolysis by anti-wild-type Spy0167 antisera is shown in FIGS. 21-23 and Tables 10-12. Anti-Spy0167 sera titers are included between 1/7,000 and 1/14,000 (arithmetic mean, 1/12,167±2,714. Negative control sera (Freund's adjuvant) titers are included between 1/375 and 1/4,000 (arithmetic mean, 1/1,854±1,384).

TABLE 10
(shown graphically in FIG. 22).
arithmetic mean of tested sera - %
hemolysis

| | anti- | negative |
|---|---|---|
| dilution | Spy0167 | control |
| factor/sera | sera | sera |
| 125 | | 9 |
| 250 | | 10 |
| 500 | | 19 |
| 1,000 | 2 | 38 |
| 2,000 | 2 | 69 |
| 4,000 | 2 | 84 |
| 8,000 | 19 | 93 |
| 16,000 | 78 | 97 |
| 32,000 | 99 | |
| 64,000 | 97 | |
| 128,000 | 100 | |

TABLE 11

| anti-Spy0167 sera | | negative control sera | |
|---|---|---|---|
| (Freund's adjuvant) | | (Freund's adjuvant) | |
| serum | 50% hemolysis inhib. | serum | 50% hemolysis inhib. |
| A | 14,000 | 1 | 4,000 |
| B | 7,000 | 2 | 1,500 |
| C | 12,000 | 3 | 375 |
| D | 12,000 | 4 | 3,000 |
| E | 14,000 | 5 | 1,500 |
| F | 14,000 | 6 | 750 |

TABLE 12
(shown graphically in FIG. 23)

| ng/ml Spy0167 | % hemolysis |
|---|---|
| 1.6 | 4 |
| 3.1 | 3 |
| 6.3 | 6 |
| 12.5 | 30 |
| 25 | 94 |
| 50 | 100 |
| 100 | 100 |
| 200 | 100 |

[0515] Titration of Hemolytic Activity of Wild-Type Spy0167, Chemically Detoxified Wild-Type Spy0167 and Spy0167 Mutants

[0516] Titration of hemolytic activity of wild-type Spy0167, chemically detoxified wild-type Spy0167, and Spy0167 mutants (P427L; P427L+W535F) is shown in Table 13.

TABLE 13

| | | HU/mg- |
|---|---|---|
| protein | HU/mg | Spy0167/mutants |
| Spy0167 wild-type tag-less | 728,307 | 1 |
| Spy0167 P427L tag-less | 711 | 1,024 |
| Spy0167 P427L + W535F tag- | <22 (stim. 10) | >33.000 |
| less | | |
| Spy0167 wild-type tag-less | 45,511 | |
| Spy0167 wild-type tag-less, | <<89 | >>511 |
| detoxified | | |

[0517] Inhibition of Spy0167 Hemolysis by Antiserum Against Mutant Spy0167 Proteins

[0518] Inhibition of Spy0167 hemolysis by antisera against mutant Spy0167 proteins is shown in FIGS. 27-29 and Tables 14-16. Using 50 ng/ml (3.5 HU) of toxin, the sera dilution required to obtain 50% reduction of Spy0167 hemolytic activity for Spy0167 mutant W535-P427L is 1/17,860 using Alum adjuvant and 1/7991 using MF59™ adjuvant. Negative control (adjuvant alone) titers are 1/1,000 (Alum) and 1/125 (MF59™).

TABLE 14
(shown graphically in FIG. 27).
50 ng/ml (3.5 HU) of wild-type Spy0167

| adjuvant | specific inhibition/non-specific inhibition |
|---|---|
| alum | 18 |
| MF ™ 59 | 64 |

TABLE 15
(shown graphically in FIG. 28)
100 ng/ml (37 HU) of wild-type Spy0167

| | specific inhibition/ |
|---|---|
| adjuvant | non-specific inhibition |
| alum | >227 |
| MF ™ 59 | >117 |

TABLE 16
(shown graphically in FIG. 29)

| ng/ml Spy0167 | % hemolysis |
|---|---|
| 1.6 | 3.5 |
| 3.1 | 5.8 |
| 6.3 | 13 |
| 12.5 | 42 |
| 25 | 86 |
| 50 | 100 |
| 100 | 100 |
| 200 | 100 |

### Example 20

### In Vivo Protection Experiments

[0519] The purified Spy0167 P427L protein, together with Freund's adjuvant, was administered intraperitoneally to 40 mice. The mice were then challenged intranasally with the 3348 M1 GAS strain. Table 17 reports the data obtained in 3 separate experiments, showing that 100% protection was consistently achieved in all experiments.

TABLE 17
Infection survival rate of mice

| | % surviving mice | | |
|---|---|---|---|
| antigen | Experiment 1 | Experiment 2 | Experiment 3 |
| Spy0167 Pro247Leu | 100 | 100 | 100 |
| E. coli contaminants | 10 | 10 | 10 |
| (negative control) | | | |
| homologous | 100 | 90 | 90 |
| M1 protein | | | |
| (positive control) | | | |

[0520] Groups of 10-20 mice were immunized with 20 μg of the recombinant protein at days 0, 21 and 35. Mice of negative control groups were immunized either with GST alone or with E. coli contaminants, depending on the version of the GAS recombinant protein used. Two weeks after the third immunization, blood samples were taken. A few days afterwards, immunized mice were challenged intranasally with 10⁸ cfu (50 μl) of the M1 3348 GAS strains. Survival of mice was monitored for a 10-14 day period. Immune sera obtained from the different groups were tested for immunogenicity on the entire Spy0167 recombinant protein (western blot analysis). The results are shown in Tables 18 and 19.

TABLE 18

| | | | % negative |
|---|---|---|---|
| | | | control |
| Protein | # mice | % survival | survival |
| Spy0167_Pro247Leu His | 10 | 90 | 30 |
| Spy0167_Pro247Leu His | 10 | 100 | 20 |
| Spy0167_Pro247Leu His | 10 | 80 | 30 |
| Spy0167_WT | 20 | 95 | 15 |
| Spy0167_WT | 10 | 100 | 40 |

TABLE 19

| | | | % negative |
|---|---|---|---|
| | | | control |
| Protein | # mice | % survival | survival |
| rSpy0167 WT his-tagged | 20 | 100 | 45 |
| C530G his-tagged | 20 | 100 | 45 |
| W535F his-tagged | 20 | 100 | 45 |
| W535F-D482N his-tagged | 20 | 100 | 45 |
| P427L his-tagged | 20 | 95 | 45 |
| Δala248 his-tagged | 20 | 100 | 45 |

### Example 21

### In Vivo Toxicity Experiments

[0521] Protocols

[0522] Intravenous injection of Spy0167. A solution of either wild-type or mutant Spy0167 in PBS is diluted in a solution of PBS+2 mM DTT, then 100 ml is injected into the tail vein of a mouse. Mice are observed for 2-3 days. Injection of wild-type Spy0167 typically results in death within a few minutes.

[0523] In vivo lethality inhibition assay. For lethality inhibition mediated by immune sera, 10 μg/mouse of wild-type Spy0167 (a solution of 100 μg/ml in PBS, 2 mM DTT) are incubated for 20 minutes with rotation at room temperature with either anti-Spy0167 serum or control serum (obtained from mice immunized with adjuvant alone). After incubation, the samples are inoculated in the mice by intravenous injection into the tail vein. Mice are observed for 2-3 days.

[0524] The results for wild-type Spy0167 and mutant Spy0167 P427L-W535F are shown in Table 20.

TABLE 20

| | |
|---|---|
| wild-type Spy0167 | P427L-W535F |

| μg/mouse | dead/treated | μg/mouse | dead/treated |
|---|---|---|---|
| | | 100 | 0/4 |
| 50 | 4/4 | 50 | 0/4 |
| 10 | 8/8 | 10 | 0/8 |
| 2 | 0/4 | | |
| 0.4 | 0/4 | | |
| 0.04 | 0/4 | | |

[0525] Acute in vivo acute toxicity was assessed using a dose of 10 μg/mouse of wild-type Spy0167 as a positive control and injection of Freund's adjuvant alone as a negative control. Ten μg/mouse of wild-type Spy0167 was incubated with either wild-type Spy0167 antiserum or with control serum and inoculated into mice as described above. The results are shown in Table 21.

TABLE 21
wild-type Spy0167 (10 μg/mouse)

| sera | serum dilution | dead/treated |
|---|---|---|
| none | | 8/8 |
| wild-type | 1/5 | 0/4 |
| Spy0167 | | |
| wild-type | 1/10 | 0/4 |
| Spy0167 | | |
| wild-type | 1/20 | 4/4 |
| Spy0167 | | |
| wild-type | 1/50 | 4/4 |
| Spy0167 | | |
| wild-type | 1/100 | 4/4 |
| Spy0167 | | |
| negative control | 1/5 | 4/4 |

[0526] The results of another set of experiments performed as described above are shown in Tables 22 and 23. In vivo acute toxicity was assessed using either 5 or 10 μg/mouse of wild-type Spy0167. In particular, 10 μg/mouse of wild type Spy0167 were preincubated either with sera from mice immunized with Spy0167 P427L-W535F or only PBS (no serum). In addition, 5 μg/mouse of wild type Spy0167 were preincubated either with sera from mice immunized with Spy0167 P427L-W535F or sera from mice immunized with PBS plus adjuvant (Alum), as negative control serum.

[0527] The results demonstrate that lethal doses of wild-type Spy0167 are neutralized by anti-Spy0167 P427L-W535F sera but not by negative control sera at the same dilution.

TABLE 22
wild-type Spy0167 (10 μg/mouse)

| Sera | serum dilution | dead/treated |
|---|---|---|
| none | — | 4/4 |
| anti-Spy0167 P427L-W535F, | 1/5 | 0/4 |
| alum adjuvant | | |

TABLE 23
wild-type Spy0167 (5 μg/mouse)

| Sera | serum dilution | dead/treated |
|---|---|---|
| anti-Spy0167 P427L-W535F, | 1/5 | 0/4 |
| alum adjuvant | | |
| negative control (alum alone) | 1/5 | 4/4 |

### Example 22

[0528] Immunization with Spy0167 P427L-W535F Protects Mice Against Intravenous Injection of Wild-Type Spy0167

[0529] Mice were immunized intraperitoneally three times (day 0, day 21, and day 35) with either wild-type Spy0167 or with the Spy0167 mutant P427L-W535F using alum as an adjuvant (20 μg protein in 2 mg/ml aluminium hydroxide). Mice immunized with adjuvant alone were used as a negative control. On day 55 mice were injected intravenously with different concentrations of a solution of wild-type Spy0167 in PBS, 2 mM DTT and monitored for at least 72 hours. The results are shown in Table 24.

TABLE 24

| | Dose of wild-type tagless Spy0167 injected into mouse tail vein | | | |
|---|---|---|---|---|
| | 2.5 μg/mouse | 5 μg/mouse | 10 μg/mouse | 20 μg/mouse |
| | survival (no. of | survival (no. of | survival (no. of | survival (no. of |
| | mice treated) | mice treated) | mice treated) | mice treated) |
| adjuvant (alum) | 100% (4) | 0% (12) | not tested | not tested |
| wild-type | not tested | 100% (8) | 100% (4) | 100% (4) |
| Spy0167 tagless | | | | |
| Spy0167 P427L-W535F | not tested | 100% (8) | 100% (4) | 100% (4) |
| tagless | | | | |

[0530] Five μg/mouse of wild-type Spy0167 is lethal for mice immunized with adjuvant alone; these mice died within a few minutes after Spy0167 injection. However, even 20 μg/mouse of the same wild-type Spy0167 preparation did not kill mice immunized with either wild-type Spy0167 or with the P427L-W535F Spy0167 mutant.

### Example 23

[0531] Protection Against Intranasal Challenge with GAS M1 Strain by Spy0167 Mutant P427L-W535F

[0532] Thirty mice were immunized intraperitoneally with the Spy0167 mutant P427L-W535F, with either Alum or MF59 as adjuvants, and challenged intranasally with a GAS Ml strain. The results are shown in FIG. 30. Seventy-seven percent of the mice immunized with the Spy0167 mutant P427L-W535F and Alum were protected against intranasal challenge with a GAS M1 strain, as compared with 3% of the negative control mice (immunized with adjuvant only). Ninety percent of the mice immunized with the Spy0167 mutant P427L-W535F and MF59 were protected against intranasal challenge with a GAS M1 strain, as compared with 10% of the negative control mice (immunized with adjuvant only). These protection levels are comparable with those obtained by immunizing mice with wild-type Spy0167.

### Example 24

### In Vivo Protection Studies of Mice Immunized with GAS Antigens

[0533] This example provides the results of immunogenicity/protection tests carried out with various combinations of GAS antigens and/or GAS-specific polysaccharide conjugated with CRM197 (GC) following challenge with GAS strains of different M types. GAS proteins and GC were formulated either with Freund's adjuvant, aluminium hydroxide, or MF59. Protein antigen doses were 20 μg when used alone; protein combination formulations contained 20 μg each of wild-type Spy0269 (SEQ ID NO:177) and Spy0416 D151A/S617A (SEQ ID NO:198) and 10 μg of Spy0617 P427L/W535F (SEQ ID NO:125). GC doses are indicated in the tables.

[0534] The immunization schedule involved three doses at days 0, 21, and 35. Bleedings were done before first immunization and two weeks after the third immunization. Negative control groups were immunized with adjuvant only. Positive control groups were immunized with M protein homologous to the challenge strain.

[0535] Two weeks after the third immunization, mice were infected with lethal doses ranging from 2.5×10⁶ to 2.5×10⁸ (intranasal infection) or 20 to 2.5×10⁶ (intraperitoneal infection), depending on the challenge strain used. Survival rates were determined and are reported in Tables 25 and 26. The p-value was calculated with Fisher's test.

[0536] Immunogenicity was tested by ELISA.

[0537] Protection by Single Antigens and Their Combination in Freund's Adjuvant Against Intranasal Infection with M1, M12, and M23

[0538] Table 25 reports the results of experiments in which mice were immunized with Spy0269 (SEQ ID NO:177), Spy0416 D151A/S617A (SEQ ID NO:198), or Spy0617 P427L/W535F (SEQ ID NO:125), or a combination of these antigens (“combo”) formulated with Freund's adjuvant and then challenged intranasally with M1, M12 and M23 strains. The results indicate that:
[0539] a. Spy0269 confers statistically significant protection against M1, M12 and M23 infection;
[0540] b. Spy0416 D151A/S617A and Spy0617 P427L/W535F confer significant protection against intranasal infection with M1 serotype; and
[0541] c. the combination of Spy0269, Spy0416 D151A/S617A and Spy0617 P427L/W535F confers >40% protection against M1, M12 and M23 GAS serotypes.

TABLE 25

| | M1 3348 | | | M12 EM5 | | | M23 2071 | | |
|---|---|---|---|---|---|---|---|---|---|
| antigen | Live/Total | % surv | Pval | Live/Total | % surv | Pval | Live/Total | % surv | Pval |
| Spy0269 | 82/145 | 57 | 0.0001 | 73/165 | 44 | 0.0001 | 23/35 | 66 | 0.0001 |
| Spy0416 D151A/S617A | 114/168 | 68 | 0.0001 | 22/80 | 28 | 0.1855 | 27/60 | 45 | 0.1855 |
| Spy0167 P427L/W534F | 105/114 | 92 | 0.0001 | 23/80 | 29 | 0.4842 | 7/20 | 35 | 0.2733 |
| combo | 145/152 | 95 | 0.0001 | 33/80 | 41 | 0.1354 | 39/80 | 49 | 0.0002 |
| M protein | 176/184 | 96 | | 136/180 | 76 | | 78/79 | 99 | |
| negative | 67/241 | 28 | | 64/258 | 25 | | 33/134 | 25 | |

[0542] Protection by the Combination of GAS25, GAS40, and GAS57 Antigens Plus GC, Formulated with Alum Against Intraperitoneal Infection with M1

[0543] Table 26 reports the results of experiments in which mice were immunized with the combination of Spy0167 mutant P427L/W535F, wild-type Spy0269, and Spy0416 mutant D151A/S617A (“combo”) with or without GC formulated with Alum and then challenged intraperitoneally with M1. The results indicate that statistically significant protection was obtained both with the protein combination alone and with the protein combination plus GC. Thus, even in combination, the exceptional immunogenicity of these GAS antigens is maintained.

TABLE 26

| | M1 3348 | | |
|---|---|---|---|
| antigen | Live/Total | % Surv | Pval |
| combo | 45/92 | 49 | 0.0001 |
| GC | 82/168 | 49 | 0.0001 |
| combo + GC | 36/72 | 50 | 0.0001 |
| M protein | 51/58 | 88 | 0.0001 |
| negative | 36/252 | 14 | |

### Example 25

### Cell Binding Assay

[0544] Human (A549, HeLa, 293, Detroit, ME180) or monkey (LLCMK2) epithelial cell lines are non-enzymatically detached from their support using a cell dissociation solution (Sigma), harvested, and suspended in Dulbecco's modified Eagle medium (DMEM). Approximately 2×10⁵ cells are mixed with either medium alone or with different Spy0269 recombinant protein concentrations (μg/ml) in a total volume of 200 ml in 96-well plates with U-shaped bottoms. Incubation at 4° C. is carried out for 1 hour. After two washes with PBS, cells are incubated with Spy0269 antibodies or antiserum (e.g., for antiserum, 1:200 in PBS/BSA 1%) for 1 hour at 4° C. After two washes, the samples are incubated at 4° C. for 30 minutes with a secondary antibody (e.g., for a mouse Spy0269 antiserum, the secondary antibody can be a R-phycoerythrin-conjugated goat F(ab)₂ antibody specific for mouse immunoglobulin diluted 1:100 in PBS/BSA 1%). Binding reactions are analyzed by flow cytometry. The mean fluorescence intensity for each population is calculated.

### Example 26

### Opsonophagocytosis Assay

[0545] This example describes the opsonophagocytosis assay used in the Examples below. Briefly, bacteria (10-50 colony forming units, CFUs, 25 μl in PBS) are incubated with 225 μl of whole blood from rabbits immunized either with adjuvant alone or with the tested antigen(s). The samples are incubated 5 hr at 37° with end-over-end rotation. Following dilution, samples are plated on blood agar plates and the number of CFUs is estimated.

[0546] In this assay, background killing by sera from animals immunized with adjuvant alone ranges from 7-36%. Killing activity by antigens varies but is consistently positive (e.g., 72-97% for M1 antibodies, 47-64% for GC antibodies, and 76-85% for antibodies raised against the combination of wild-type Spy0269 (SEQ ID NO:177), Spy0167 double mutant P427L/W535F (SEQ ID NO:125), and Spy0416 double mutant D151A/S617A (SEQ ID NO:198).

### Example 27

### Whole Blood Bactericidal Assays Demonstrating that Anti-Glycoconjugate (GC) Antibodies Mediate Killing of S. pyogenes

[0547] The assay described in Example 26 was carried out using whole blood obtained from rabbits immunized with 100 μg GC). The results, shown in FIG. 34, demonstrate that anti-GC antibodies mediate killing of S. pyogenes.

### Example 28

### Whole Blood Bactericidal Assays Demonstrating that the Combination of Anti-Glycoconjugate (GC) Antibodies and Antibodies Generated Against GAS Antigen Combinations Enhance Killing of S. pyogenes

[0548] The assay described in Example 26 was carried out with whole blood obtained from rabbits immunized with (a) Freund's adjuvant, (b) M1 protein, (c) a combination of wild-type Spy0269 (SEQ ID NO:177), Spy0167 double mutant P427L/W535F (SEQ ID NO:125), and Spy0416 double mutant D151A/S617A (SEQ ID NO:198) (100 μg each), (d) GC, and (e) the combination of wild-type Spy0269 (SEQ ID NO:177), Spy0167 double mutant P427L/W535F (SEQ ID NO:125), Spy0416 double mutant D151A/S617A (SEQ ID NO:198), and GC. The results are shown in FIG. 35.

[0549] It is desirable for a GAS vaccine to be bactericidal as well as immunogenic. These results demonstrate that, even in combination, these GAS antigens have bactericidal activity. The results also demonstrate a higher bactericidal effect of the combination of GAS antigens and GC antigen compared with that of either the GAS antigen combination or GC antigen alone.

### Example 29

### Experiments Demonstrating Lack of Cellular Toxicity of GAS Antigens

[0550] Endothelial cells human brain microvascular endothelial cells (HBMECs) were treated in vitro for 24 hours with various concentrations of recombinant GAS antigens in RPMI 1640 medium. Negative controls were not treated (“NT”), and cells treated with TNFα 1 μg/ml were used as positive controls Annexin V and propidium iodide staining were used to measure the percentage of apoptotic cells by flow cytometry. The results indicate no significant toxicity at the concentrations of wild-type Spy0269 (SEQ ID NO:177), Spy0167 double mutant P427L/W535F (SEQ ID NO:125), Spy0416 double mutant D151A/S617A (SEQ ID NO:198), and glycoconjugate (“GAS GC”) used in these Examples. See FIGS. 36A-D.

### Example 30

### Protein Antigen Conservation and Expression

[0551] The table below shows the average percent identity for each of Spy0269, Spy0416, and Spy0167 among 57, 49, and 13 S. pyogenes strains, respectively.

| | % identity | |
|---|---|---|
| antigen | (no. strains analyzed) | FACS positive |
| Spy0269 | 93% (57 strains) | 119/188 (63.3%) |
| Spy0416 | 95% (49 strains) | 98/174 (56.3%) |
| Spy0167 | 97% (13 strains) | 32/60 (53.3%) |

### Example 31

### ELISA Assays

[0552] Briefly, plates are coated with antigen (0.1-0.3 μg/well) and blocked with 2% bovine serum albumin (BSA) in phosphate-buffered saline (PBS). After incubation with two-fold serial dilutions of the tested sera, plates are washed with 2% bovine serum albumin (BSA) in phosphate-buffered saline (PBS), and 0.05% TWEEN20® and incubated with secondary antibody (anti-total IgG, 1:2000) conjugated with alkaline phosphatase. After incubation with the substrate p-nitrophenyl phosphate (pNPP, 3 μg/ml), absorbance is measured at 405 nm. Serum titers are calculated by interpolating ODs from a standard curve. This assay is linear and reproducible, as shown in FIGS. 37A-D.

### Example 32

### In Vivo Challenge Experiments

[0553] CD1 5-6 week old female mice were immunized intraperitoneally 3 times on days 0, 21 and 35 with various doses of GAS antigens adjuvanted with alum in PBS and challenged either intranasally (50-ml Todd Hewitt containing an LD90 bacterial dose) or intraperitoneally (200 μl Todd Hewitt containing an LD90 bacterial dose) with various strains of S. pyogenes. Results are shown in Tables 27 and 28. In Tables 27 and 28, “40,” “25,” and “57,” respectively, are wild-type Spy0269 (SEQ ID NO:177), Spy0167 double mutant P427L/W535F (SEQ ID NO:125), and Spy0416 double mutant D151A/S617A (SEQ ID NO:198).

TABLE 27
Protection conferred by GAS antigens and combinations of GAS antigens in an
intraperitoneal challenge model.

| | | Challenge serotypes/strains | | | | | |
|---|---|---|---|---|---|---|---|
| | | M1 3348 | | M23 2071 | | M6 S43 | |
| | | % survival | | % survival | | % survival | |
| adjuvant | antigen | (no. mice) | P | (no. mice) | P | (no. mice) | P |
| | GC | 47 (176) | <0.001 | 30 (80) | <0.001 | 33 (104) | <0.001 |
| | 25 + 40 + 57 | 79 (156) | <0.001 | 36 (64) | <0.001 | 36 (88) | <0.001 |
| | 25 + 40 + 57 + GC | 74 (80) | <0.001 | 48 (64) | <0.001 | 48 (88) | <0.001 |
| alum | adjuvant alone | 14 (>100) | | 10 (>100) | | 11 (>100) | |

TABLE 28
Protection conferred by GAS antigens and combinations of GAS antigens in an
intranasal challenge model.

| | | challenge serotypes/strains | | | | | | | |
|---|---|---|---|---|---|---|---|---|---|
| | | M1 3348 | | M12 EM5 | | M23 2071 | | M6 543 | |
| | | % | | % | | % | | % | |
| | | survival | | survival | | survival | | survival | |
| | GAS | (no. | | (no. | | (no. | | (no. | |
| adjuvant | antigen | mice) | P | mice) | P | mice) | P | mice) | P |
| Freund's | 25 | 95 (100) | <0.001 | 38 (50) | | 30 (60) | | | |
| | 40 | 45 (82) | <0.001 | 42 (150) | <0.001 | 66 (35) | <0.001 | | |
| | 57 | 72 (143) | <0.001 | 33 (189) | <0.05 | 39 (80) | | | |
| | 25 + 40 + 57 | 96 (56) | <0.001 | 40 (100) | <0.05 | 49 (80) | <0.001 | | |
| | (adjuvant | 23 (>100) | | 21 (>100) | | 21 (>100) | | | |
| | alone) | | | | | | | | |
| alum | 25 | 88 (48) | <0.001 | | | | | | |
| | 40 | 27 (130) | <0.05 | | | | | | |
| | 57 | 38 (157) | <0.001 | | | | | | |
| | 40 + 57 | 67 (46) | <0.001 | | | | | | |
| | 25 + 40 + 57 | 87 (280) | <0.001 | 33 (128) | <0.001 | 54 (48) | <0.001 | 53 (64) | <0.001 |
| | (adjuvant | 15 (>100) | | 9 (128) | | 10 (48) | | 22 (64) | |
| | alone) | | | | | | | | |

### Example 33

### Inclusion of Alum Provides Protection Against Strain M1 3348

[0554] This example demonstrates that inclusion of Alum in both Spy0167 and in combination formulations provides protection against S. pyogenes strain M1 3348.

[0555] CD1 5-6 week female mice were immunized with Spy0167 (GAS25) 10 μg or with a combination of Spy0167 (10 μg) together with Spy0269 (GAS40, 20 μg) and Spy0416 (GAS57, 20 μg) (“combination”), with or without alum. Animals were immunized intraperitoneally with 3 doses at days 0, 21 and 35. Intranasal challenge with M1 3348 was carried out essentially as described in Example 4. The results are shown in Table 29.

TABLE 29
Effect of including alum on survival after
intranasal challenge with M1 3348.

| | | % survival after |
|---|---|---|
| | | M1 3348 challenge |
| antigen | adjuvant | (no. animals) |
| Spy0167 | alum | 84 (32) |
| Spy0167 | — | 29 (32) |
| — | alum | 14 (31) |
| combination | alum | 66 (32) |
| combination | | 23 (32) |
| — | alum | 14 (29) |

### Example 34

### Stability of GAS Antigen Formulations

[0556] Stability and in vivo potency of a combination GAS antigen formulation containing 100 μg/ml Spy0269 (1 mg/ml solution in PBS), 100 μg Spy0416 double mutant D151A/S617A (1 mg/ml solution in PBS), 50 μg Spy0167 double mutant P427L/W535F (1 mg/ml solution in PBS), 2 mg/ml aluminum hydroxide, 10 mM histidine buffer (pH 7.0), 9 g/l sodium chloride, with a pH of 7.0+/−0.3, with an osmolality of 300+/−20 mOsm/kg was tested by SDS-PAGE analysis for antigen integrity. The formulation is stable up to 1 year at 4° C. Antigen stability was evaluated by incubating at 2-8° C. over a one year period. All three protein components appeared quite stable after one year as assessed by SDS-PAGE. The protein antigens remain adsorbed to alum (>97.5%) for at least 36 weeks 2-8° C.

### Example 35

### Effect of Spy0416 and Spy0167 Antibodies

[0557] This example demonstrates that antibodies to Spy0416 and Spy0167 block toxic activity.

[0558] Spy0416: Spy0416 was pre-incubated with pools of mouse specific sera or with a human serum with high ELISA titres to Spy0416. The mix was then incubated with IL-8 (10 μg/ml), and then tested for the presence of uncleaved IL-8 using an antibody which is specific for the cytokine but which is unable to recognize the cleaved inactive form. The results are expressed as percentage of uncleaved IL-8 calculated as follows:

$$\frac{[ IL \text{-} 8 in the reaction mix ]}{[ IL \text{-} 8 in the control mix ]} \times 100 ,$$

where “control mix” is the reaction mix without the enzyme at time point 0.

[0559] Spy0167: Wildtype Spy0167 was pre-incubated with a pool of sera from mice immunized either with 20 μg of Spy0167P427L/W535F or with adjuvant alone, and with human sera from responders and non responders. The mix was added to a sheep blood cell suspension and the OD540 nm decrease of the reaction supernatant was determined. Inhibition titer is expressed as the serum dilution required to reduce Spy0167-induced hemolysis by 50%.

[0560] The results are shown in FIGS. 41A-B.

### Example 36

### Dose-Range Experiments

[0561] Five-week old female CD1 mice were immunized with varying doses of wild-type Spy0269 (SEQ ID NO:177), Spy0416 mutant D151A/S617A (SEQ ID NO:198), and Spy0167 mutant P427L/W535F (SEQ ID NO:125) on days 0, 21, and 35. Dose-dependent IgG responses in the mice were measured by ELISA as described in Example 31. The results are shown in FIGS. 38A-C.

[0562] Mice were immunized with individual GAS protein antigens at various concentrations and challenged intranasally with S. pyogenes M1. The results are shown in Table 30.

TABLE 30

| protein | dose (μg) | mice | dead | % survival |
|---|---|---|---|---|
| GAS40 | 2 | 32 | 20 | 38 |
| | 20 | 32 | 18 | 44 |
| Spy0416 mutant | 2 | 32 | 16 | 53 |
| D151A/S617A | 20 | 32 | 19 | 43 |
| Spy0167 mutant | 2 | 32 | 24 | 75 |
| P427L/W535F | 0.5 | 32 | 28 | 87 |
| (SEQ ID NO: 125) | 0.125 | 32 | 20 | 62 |
| (PBS) | | 32 | 27 | 16 |

[0563] As shown in Table 30, there is no clear dose-dependent protection, indicating that a variety of concentrations of these antigens are useful for achieving protection against S. pyogenes challenge.

[0564] Mice were immunized with the combination of 20 μg wild-type Spy0269 (SEQ ID NO:177), 10 μg Spy0167 double mutant P427L/W535F (SEQ ID NO:125), and 20 μg Spy0416 double mutant D151A/S617A (SEQ ID NO:198) at various concentrations and challenged intranasally with S. pyogenes M1. The results are shown in Table 31.

TABLE 31

| protein | dose (μg) | mice | dead | % survival |
|---|---|---|---|---|
| combination | 20 + 20 + 10 | 16 | 11 | 31 |
| | 20 + 20 + 2 | 16 | 10 | 38 |
| | 20 + 2 + 10 | 16 | 6 | 63 |
| | 20 + 2 + 2 | 16 | 7 | 50 |
| | 2 + 20 + 10 | 16 | 2 | 88 |
| | 2 + 20 + 2 | 16 | 9 | 44 |
| | 2 + 2 + 10 | 16 | 16 | 0 |
| | 2 + 2 + 2 | 16 | 14 | 13 |
| none | 0 + 0 + 0 | 16 | 15 | 6 |

[0565] As with the single antigen dose experiments described above, there is no clear dose-dependent protection, indicating that, even in combination, a variety of concentrations of these antigens are useful for achieving protection against S. pyogenes challenge.

[0566] The results are summarized in FIG. 39. FIG. 40 shows an analysis of a LogNormal model adopted as a first approximation of mean survival time (MST; Mu).

1. A composition comprising:
(a) a purified Spy0269 protein comprising the amino acid sequence SEQ ID NO:177;
(b) a purified mutant Spy0167 protein comprising the amino acid sequence SEQ ID NO:125; and
(c) a purified mutant Spy0416 protein comprising the amino acid sequence SEQ ID NO:198.

2. The composition of claim 1 wherein at least one of the purified Spy0269, mutant Spy0167, and mutant Spy0416 proteins is produced recombinantly.

3. The composition of claim 1 further comprising a group A polysaccharide of formula [chemical structure]
wherein R is a terminal reducing L-rhamnose or D-GlcpNAc and n is a number from about 3 to about 30.

4. The composition of claim 1 further comprising an adjuvant.

5. The composition of claim 4 wherein the adjuvant is alum.

6. The composition of claim 1 further comprising a pharmaceutically acceptable carrier.

7. The composition of claim 1 further comprising the group A polysaccharide, alum, and the pharmaceutically acceptable carrier.

8. The composition of claim 1 further comprising a polypeptide antigen which is useful in a pediatric vaccine.

9. The composition of claim 8 wherein the polypeptide antigen is selected from the group consisting of N. meningitidis, S. pneumoniae, Bordetella pertussis, Moraxella catarrhalis, Clostridium tetani, Chorinebacterim diphteriae, respiratory syncytial virus, polio virus, measles virus, mumps virus, rubella virus, and rotavirus polypeptide antigens.

10. The composition of claim 1 further comprising a polypeptide antigen which is useful in a vaccine for elderly or immunocompromised individuals.

11. The composition of claim 10 wherein the polypeptide antigen is selected from the group consisting of Enterococcus faecalis, Staphylococcus aureaus, Staphylococcus epidermis, Pseudomonas aeruginosa, Legionella pneumophila, Listeria monocytogenes, influenza virus, and parainfluenza virus polypeptide antigens.

12. A method of treating or reducing risk of infection by Streptococcus pyogenes, administering to an individual in need thereof an effective amount of a composition comprising:
(a) a purified Spy0269 protein comprising the amino acid sequence SEQ ID NO:177;
(b) a purified mutant Spy0167 protein comprising the amino acid sequence SEQ ID NO:125; and
(c) a purified mutant Spy0416 protein comprising the amino acid sequence SEQ ID NO:198.

13. The method of claim 12 wherein the composition further comprises one or both of:
(d) a group A polysaccharide of formula [chemical structure]
wherein R is a terminal reducing L-rhamnose or D-GlcpNAc and n is a number from about 3 to about 30; and
(e) an adjuvant.

14. A method of making a vaccine for treating Streptococcus pyogenes infection, comprising combining:
(a) a purified Spy0269 protein comprising the amino acid sequence SEQ ID NO:177;
(b) a purified mutant Spy0167 protein comprising the amino acid sequence SEQ ID NO:125;
(c) a purified mutant Spy0416 protein comprising the amino acid sequence SEQ ID NO:198; and
(d) a pharmaceutically acceptable carrier.

15. The method of claim 14 wherein at least one of the purified Spy0269, mutant Spy0167, and mutant Spy0416 proteins is produced recombinantly.

16. The method of claim 14 further comprising combining one or both of:
(e) a group A polysaccharide of formula [chemical structure]
wherein R is a terminal reducing L-rhamnose or D-GlcpNAc and n is a number from about 3 to about 30; and
(f) an adjuvant.

17. The method of claim 16 wherein the adjuvant is alum.

18. An isolated host cell comprising at least one nucleic acid molecule which encodes:
(a) a Spy0269 protein comprising the amino acid sequence SEQ ID NO:177; and
(b) a mutant Spy0167 protein comprising the amino acid sequence SEQ ID NO:125; and
(c) a mutant Spy0416 protein comprising the amino acid sequence SEQ ID NO:198.

19. The isolated host cell of claim 18 which comprises:
(1) a first nucleic acid molecule which encodes the Spy0269 protein and a second nucleic acid molecule which encodes the mutant Spy0167 protein and the mutant Spy0416 protein; or
(2) a first nucleic acid molecule which encodes the Spy0269 protein and the mutant Spy0167 protein and a second nucleic acid molecule which encodes the mutant Spy0416 protein; or
(3) a first nucleic acid molecule which encodes the Spy0269 protein and a second nucleic acid molecule which encodes the mutant Spy0167 protein and the mutant Spy0416 protein.

20. The isolated host cell of claim 18 wherein each of the Spy0269 protein, the mutant Spy0167 protein and the mutant Spy0416 protein is encoded by a separate nucleic acid molecule.

The application's sequence listing, which the Patent Office published only in electronic form, follows.

SEQUENCE LISTING (198 sequences)

SEQ ID NO: 1 - protein, 1647 aa, Streptococcus pyogenes
VEKKQRFSLRKYKSGTFSVLIGSVFLVMTTTVAADELSTMSEPTITNHAQQQAQHLTNTELSSAESKSQDTSQITLKTNREKEQSQDLVSEPTTTELADTDAASMANTGSDATQKSASLPPVNTDVHDWVKTKGAWDKGYKGQGKVVAVIDTGIDPAHQSMRISDVSTAKVKSKEDMLARQKAAGINYGSWINDKVVFAHNYVENSDNIKENQFEDFDEDWENFEFDAEAEPKAIKKHKIYRPQSTQAPKETVIKTEETDGSHDIDWTQTDDDTKYESHGMHVTGIVAGNSKEAAATGERFLGIAPEAQVMFMRVFANDIMGSAESLFIKAIEDAVALGADVINLSLGTANGAQLSGSKPLMEAIEKAKKAGVSVVVAAGNERVYGSDHDDPLATNPDYGLVGSPSTGRTPTSVAAINSKWVIQRLMTVKELENRADLNHGKAIYSESVDFKDIKDSLGYDKSHQFAYVKESTDAGYNAQDVKGKIALIERDPNKTYDEMIALAKKHGALGVLIFNNKPGQSNRSMRLTANGMGIPSAFISHEFGKAMSQLNGNGTGSLEFDSVVSKAPSQKGNEMNHFSNWGLTSDGYLKPDITAPGGDIYSTYNDNHYGSQTGTSMASPQIAGASLLVKQYLEKTQPNLPKEKIADIVKNLLMSNAQIHVNPETKTTTSPRQQGAGLLNIDGAVTSGLYVTGKDNYGSISLGNITDTMTFDVTVHNLSNKDKTLRYDTELLTDHVDPQKGRFTLTSHSLKTYQGGEVTVPANGKVTVRVTMDVSQFTKELTKQMPNGYYLEGFVRFRDSQDDQLNRVNIPFVGFKGQFENLAVAEESIYRLKSQGKTGFYFDESGPKDDIYVGKHFTGLVTLGSETNVSTKTISDNGLHTLGTFKNADGKFILEKNAQGNPVLAISPNGDNNQDFAAFKGVFLRKYQGLKASVYHASDKEHKNPLWVSPESFKGDKNFNSDIRFAKSTTLLGTAFSGKSLTGAELPDGHYHYVVSYYPDVVGAKRQEMTFDMILDRQKPVLSQATFDPETNRFKPEPLKDRGLAGVRKDSVFYLERKDNKPYTVTINDSYKYVSVEDNKTFVERQADGSFILPLDKAKLGDFYYMVEDFAGNVAIAKLGDHLPQTLGKTPIKLKLTDGNYQTKETLKDNLEMTQSDTGLVTNQAQLAVVHRNQPQSQLTKMNQDFFISPNEDGNKDFVAFKGLKNNVYNDLTVNVYAKDDHQKQTPIWSSQAGASVSAIESTAWYGITARGSKVMPGDYQYVVTYRDEHGKEHQKQYTISVNDKKPMITQGRFDTINGVDHFTPDKTKALDSSGIVREEVFYLAKKNGRKFDVTEGKDGITVSDNKVYIPKNPDGSYTISKRDGVTLSDYYYLVEDRAGNVSFATLRDLKAVGKDKAVVNFGLDLPVPEDKQIVNFTYLVRDADGKPIENLEYYNNSGNSLILPYGKYTVELLTYDTNAAKLESDKIVSFTLSADNNFQQVTFKITMLATSQITAHFDHLLPEGSRVSLKTAQDQLIPLEQSLYVPKAYGKTVQEGTYEVVVSLPKGYRIEGNTKVNTLPNEVHELSLRLVKVGDASDSTGDHKVMSKNNSQALTASATPTKSTTSATAKALPSTGEKMGLKLRIVGLVLLGLTCVFSRKKSTKD

SEQ ID NO: 2 - protein, 1647 aa, Streptococcus pyogenes
VEKKQRFSLRKYKSGTFSVLIGSVFLVMTTTVAADELSTMSEPTITNHAQQQAQHLTNTELSSAESKSQDTSQITLKTNREKEQSQDLVSEPTTTELADTDAASMANTGSDATQKSASLPPVNTDVHDWVKTKGAWDKGYKGQGKVVAVIDTGIDPAHQSMRISDVSTAKVKSKEDMLARQKAAGINYGSWINDKVVFAHNYVENSDNIKENQFEDFDEDWENFEFDAEAEPKAIKKHKIYRPQSTQAPKETVIKTEETDGSHDIDWTQTDDDTKYESHGMHVTGIVAGNSKEAAATGERFLGIAPEAQVMFMRVFANDIMGSAESLFIKAIEDAVALGADVINLSLGTANGAQLSGSKPLMEAIEKAKKAGVSVVVAAGNERVYGSDHDDPLATNPDYGLVGSPSTGRTPTSVAAINSKWVIQRLMTVKELENRADLNHGKAIYSESVDFKDIKDSLGYDKSHQFAYVKESTDAGYNAQDVKGKIALIERDPNKTYDEMIALAKKHGALGVLIFNNKPGQSNRSMRLTANGMGIPSAFISHEFGKAMSQLNGNGTGSLEFDSVVSKAPSQKGNEMNHFSNWGLTSDGYLKPDITAPGGDIYSTYNDNHYGSQTGTSMASPQIAGASLLVKQYLEKTQPNLPKEKIADIVKNLLMSNAQIHVNPETKTTTSPRQQGAGLLNIDGAVTSGLYVTGKDNYGSISLGNITDTMTFDVTVHNLSNKDKTLRYDTELLTDHVDPQKGRFTLTSHSLKTYQGGEVTVPANGKVTVRVTMDVSQFTKELTKQMPNGYYLEGFVRFRDSQDDQLNRVNIPFVGFKGQFENLAVAEESIYRLKSQGKTGFYFDESGPKDDIYVGKHFTGLVTLGSETNVSTKTISDNGLHTLGTFKNADGKFILEKNAQGNPVLAISPNGDNNQDFAAFKGVFLRKYQGLKASVYHASDKEHKNPLWVSPESFKGDKNFNSDIRFAKSTTLLGTAFSGKSLTGAELPDGHYHYVVSYYPDVVGAKRQEMTFDMILDRQKPVLSQATFDPETNRFKPEPLKDRGLAGVRKDSVFYLERKDNKPYTVTINDSYKYVSVEDNKTFVERQADGSFILPLDKAKLGDFYYMVEDFAGNVAIAKLGDHLPQTLGKTPIKLKLTDGNYQTKETLKDNLEMTQSDTGLVTNQAQLAVVHRNQPQSQLTKMNQDFFISPNEDGNKDFVAFKGLKNNVYNDLTVNVYAKDDHQKQTPIWSSQAGASVSAIESTAWYGITARGSKVMPGDYQYVVTYRDEHGKEHQKQYTISVNDKKPMITQGRFDTINGVDHFTPDKTKALGSSGIVREEVFYLAKKNGRKFDVTEGKDGITVSDNKVYIPKNPDGSYTISKRDGVTLSDYYYLVEDRAGNVSFATLRDLKAVGKDKAVVNFGLDLPVPEDKQIVNFTYLVRDADGKPIENLEYYNNSGNSLILPYGKYTVELLTYDTNAAKLESDKIVSFTLSADNNFQQVTFKITMLATSQITAHFDHLLPEGSRVSLKTAQDQLIPLEQSLYVPKAYGKTVQEGTYEVVVSLPKGYRIEGNTKVNTLPNEVHELSLRLVKVGDASDSTGDHKVMSKNNSQALTASATPTKSTTSATAKALPSTGEKMGLKLRIVGLVLLGLTCVFSRKKSTKD

SEQ ID NO: 3 - protein, 1647 aa, Streptococcus pyogenes
VEKKQRFSLRKYKSGTFSVLIGSVFLVMTTTVAADELSTMSEPTITNHAQQQAQHLTNTELSSAESKSQDTSQITLKTNREKEQSQDLVSEPTTTELADTDAASMANTGSDATQKSASLPPVNTDVHDWVKTKGAWDKGYKGQGKVVAVIDTGIDPAHQSMRISDVSTAKVKSKEDMLARQKAAGINYGSWINDKVVFAHNYVENSDNIKENQFEDFDEDWENFEFDAEAEPKAIKKHKIYRPQSTQAPKETVIKTEETDGSHDIDWTQTDDDTKYESHGMHVTGIVAGNSKEAAATGERFLGIAPEAQVMFMRVFANDIMGSAESLFIKAIEDAVALGADVINLSLGTANGAQLSGSKPLMEAIEKAKKAGVSVVVAAGNERVYGSDHDDPLATNPDYGLVGSPSTGRTPTSVAAINSKWVIQRLMTVKELENRADLNHGKAIYSESVDFKDIKDSLGYDKSHQFAYVKESTDAGYNAQDVKGKIALIERDPNKTYDEMIALAKKHGALGVLIFNNKPGQSNRSMRLTANGMGIPSAFISHEFGKAMSQLNGNGTGSLEFDSVVSKAPSQKGNEMNHFSNWGLTSDGYLKPDITAPGGDIYSTYNDNHYGSQTGTSMASPQIAGASLLVKQYLEKTQPNLPKEKIADIVKNLLMSNAQIHVNPETKTTTSPRQQGAGLLNIDGAVTSGLYVTGKDNYGSISLGNITDTMTFDVTVHNLSNKDKTLRYDTELLTDHVDPQKGRFTLTSHSLKTYQGGEVTVPANGKVTVRVTMDVSQFTKELTKQMPNGYYLEGFVRFRDSQDDQLNRVNIPFVGFKGQFENLAVAEESIYRLKSQGKTGFYFDESGPKDDIYVGKHFTGLVTLGSETNVSTKTISDNGLHTLGTFKNADGKFILEKNAQGNPVLAISPNGDNNQDFAAFKGVFLRKYQGLKASVYHASDKEHKNPLWVSPESFKGDKNFNSDIRFAKSTTLLGTAFSGKSLTGAELPDGHYHYVVSYYPDVVGAKRQEMTFDMILDRQKPVLSQATFDPETNRFKPEPLKDRGLAGVRKDSAFYLERKDNKPYTVTINDSYKYVSVEDNKTFVERQADGSFILPLDKAKLGDFYYMVEDFAGNVAIAKLGDHLPQTLGKTPIKLKLTDGNYQTKETLKDNLEMTQSDTGLVTNQAQLAVVHRNQPQSQLTKMNQDFFISPNEDGNKDFVAFKGLKNNVYNDLTVNVYAKDDHQKQTPIWSSQAGASVSAIESTAWYGITARGSKVMPGDYQYVVTYRDEHGKEHQKQYTISVNDKKPMITQGRFDTINGVDHFTPDKTKALGSSGIVREEVFYLAKKNGRKFDVTEGKDGITVSDNKVYIPKNPDGSYTISKRDGVTLSDYYYLVEDRAGNVSFATLRDLKAVGKDKAVVNFGLDLPVPEDKQIVNFTYLVRDADGKPIENLEYYNNSGNSLILPYGKYTVELLTYDTNAAKLESDKIVSFTLSADNNFQQVTFKITMLATSQITAHFDHLLPEGSRVSLKTAQDQLIPLEQSLYVPKAYGKTVQEGTYEVVVSLPKGYRIEGNTKVNTLPNEVHELSLRLVKVGDASDSTGDHKVMSKNNSQALTASATPTKSTTSATAKALPSTGEKMGLKLRIVGLVLLGLTCVFSRKKSTKD

SEQ ID NO: 4 - protein, 1647 aa, Streptococcus pyogenes; identical to SEQ ID NO: 3

SEQ ID NO: 5 - protein, 1647 aa, Streptococcus pyogenes; identical to SEQ ID NO: 3

SEQ ID NO: 6 - protein, 1647 aa, Streptococcus pyogenes
VEKKQRFSLRKYKSGTFSVLIGSVFLVMTTTVAANELSTMSEPTITNHAQQQAQHLTNTELSSAESKPQDTSQITPKTNREKEQSQDLVSEPTTTELADTDAAPMADTGPDATQKSASLPPVNTDVHDWVKTKGAWDKGYKGQGKVVAVIDTGIDPAHQSMRISDVSTAKVKSKEDMLARQKAAGINYGSWINDKVVFAHNYVENSDNIKENQFEDFDEDWENFEFDADAEPKAIKKHKIYRPQSTQAPKETVIKTEETDGSHDIDWTQTDDDTKYESHGMHVTGIVAGNSKEAAATGERFLGIAPEAQVMFMRVFANDVMGSAESLFIKAIEDAVALGADVINLSLGTANGAQLSGSKPLMEAIEKAKKAGVSVVVAAGNERVYGSDHDDPLATNPDYGLVGSPSTGRTPTSVAAINSKWVIQRLMTVKELENRADLNHGKAIYSESVDFKNIKDSLGYDKSHQFAYVKESTDAGYKAQDVKGKIALIERDPNKTYDEMIALAKKHGALGVLIFNNKPGQSNRSMRLTANGMGIPSAFISHEFGKAMSQLNGNGTGSLEFDSVVSKAPSQKGNEMNHFSNWGLTSDGYLKPDITAPGGDIYSTYNDNHYGSQTGTSMASPQIAGASLLVKQYLEKTQPNLPKEKIADIVKNLLMSNAQIHVNPETKTTTSPRQQGAGLLNIDGAVTSGLYVTGKDNYGSISLGNITDTMTFDVTVHNLSNKAKTLRYDTELLTDHVDPQKGRFTLTSRSLKTYQGGEVTVPANGKVTVKVTMDVSQFTKELTKQMPNGYYLEGFVRFRDSQDDQLNRVNIPFVGFKGQFENLAVAEESIYRLKSQGKTGFYFDESGPKDDIYVGKHFTGLVTLGSETNVSTKTISDNGLHTLGTFKNADGKFILEKNAQGNPVLAISPNGDNNQDFAAFKGVFLRKYQGLKASVYHASDKEHKNPLWVSPESFKGDKNFNSDIRFAKSTTLLGTAFSGKSLTGAELPDGYYHYVVSYYPDVVGAKRQEMTFDMILDRQKPVLSQATFDPETNRFKPEPLKDRGLAGVRKDSVFYLERKDNKPYTVTINDSYKYVSVEDNKTFVERQADGSFILPLDKAKLGDFYYMVEDFAGNVAIAKLGDHLPQTLGKTPIKLKLTDGNYQTKETLKDNLEMTQSDTGLVTNQAQLAVVHRNQPQSQLTKMNQDFFISPNEDGNKDFVAFKGLKNNVYNDLTVNVYAKDDHQKQTPIWSSQAGASASAIESTAWYGITARGSKVMPGDYQYVVTYRDEHGKEHQKQYTISVNDKKPMITQGRFDTINGVDHFTPDKTKALGSSGIVREEVFYLAKKNGRKFDVTEGKDGITVSDNKVYIPKNPDGSYTISKRDGVTLSDYYYLVEDRAGNVSFATLRDLKAVGKDKAVVNFGLDLPVPEDKQIVNFTYLVRDADGKPIENLEYYNNSGNSLILPYGKYTVELLTYDTNAAKLESDKIVSFTLSADNNFQQVTFKMTMLATSQITAHFDHLLPEGSRVSLKTAQGQLIPLEQSLYVPKAYGKTVQEGTYEVVVSLPKGYRIEGNTKVNTLPNEVHELSLRLVKVGDASDSTGDHKVMSKNNSQALTASATPTKTTTSATAKALPSTGEKMGLKLRIVGLVLLGLTCVFSRKKSTKD

SEQ ID NO: 7 - protein, 1647 aa, Streptococcus pyogenes
VEKKQRFSLRKYKSGTFSVLIGSVFLVMTTTVAADELSTMSEPTITNHAQQQAQHLTNTELSSAESKSQDTSQITPKTNREKEQSQDLVSEPTTTELADTDAASMANTGSDATQKSASLPPVNTDVHDWVKTKGAWDKGYKGQGKVVAVIDTGIDPAHQSMRISDVSTAKVKSKEDMLARQKAAGINYGSWINDKVVFAHNYVENSDNIKENQFEDFDEDWENFEFDADAEPKAIKKHKIYRPQSTQAPKETVIKTEETDGSHDIDWTQTDDDTKYESHGMHVTGIVAGNSKEAAATGERFLGIAPEAQVMFMRVFANDVMGSAESLFIKAIEDAVALGADVINLSLGTANGAQLSGSKPLMEAIEKAKKAGVSVVVAAGNERVYGSDHDDPLATNPDYGLVGSPSTGRTPTSVAAINSKWVIQRLMTVKELENRADLNHGKAIYSESVDFKDIKDSLGYDKSHQFAYVKESTDAGYKAQDVKDKIALIERDPNKTYDEMIALAKKHGALGVLIFNNKPGQSNRSMRLTANGMGIPSAFISHEFGKAMSQLNGNGTGSLEFDSVVSKAPSQKGNEMNHFSNWGLTSDGYLKPDITAPGGDIYSTYNDNHYGSQTGTSMASPQIAGASLLVKQYLEKTQPNLPKEKIADIVKNLLMSNAQIHVNPETKTTTSPRQQGAGLLNIDGAVTSGLYVTGKDNYGSISLGNVTDTMTFDVTVHNLSNKAKTLRYDTELLTDHVDPQKGRFTLTSRSLKTYQGGEVTVPANGKVTVRVTMDVSQFTKELTKQMPNGYYLEGFVRFRDSQDDQLNRVNIPFVGFKGQFENLAVAEESIYRLKSQGKTGFYFDESGPKDDIYVGKHFTGLVTLGSETNVSTKTISDNGLHTLGTFKNADGKFILEKNAQGNPVLAISPNGDNNQDFAAFKGVFLRKYQGLKASVYHASDKEHKNPLWVSPESFKGDKNFNSDIRFAKSTTLLGTAFSGKSLTGAELPDGYYHYVVSYYPDVVGAKRQEMTFDMILDRQKPVLSQATFDPETNRFKPEPLKDRGLAGVRKDSVFYLERKDNKPYIVTINDSYKYVSVEDNKTFVERQADGSFILPLDKAKLGDFYYMVEDFAGNVAIAKLGDHLPQTLGKTPIKLKLTDGNYQTKETLKDNLEMTQSDTGLVTNQAQLAVVHRNQPQSQLTKMNQDFFISPNEDGNKDFVAFKGLKNNVYNDLTVNVYAKDDHQKQTPIWSSQAGASASAIESTAWYGITARGSKVMPGDYQYVVTYRDEHGKEHQKQYTISVNDKKPMITQGRFDTINGVDHFTPDKTKALGSSGIVREEVFYLAKKNGRKFDVTEGKDGITVSDNKVYIPKNPDGSYTISKRDGVTLSDYYYLVEDRAGNVSFATLRDLKAVGKDKAVVNFGLDLPVPEDKQIVNFTYLVRDADGKPIENLEYYNNSGNSLILPYGKYTVELLTYDTNAAKLESDKIVSFTLSADNNFQQVTFKMTILATSQITAHFDHLLPEGSRVSLKTAQGQLIPLEQSLYVPKAYGKTVQEGTYEVVVSLPKGYRIEGNTKVNALPNEVHELSLRLVKVGDASDSTGDHKVMSKNNSQALTASATPTKTTTSATAKALPSAGEKMGLKLRIVGLVLLGLTCVFSRKKSTKD

SEQ ID NO: 8 - protein, 1646 aa, Streptococcus pyogenes
VEKKQRFSLRKYKSGTFSVLIGSAFLMMTTTVAADELSTMSEPTITNHTQQQAQHLTNTELSSAESKSQDTSQITPKTNREKEQSQDLVSEPTTELADTDAAPMANTGPDATQKSASLPPVNTDVHDWVKTKGAWDKGYKGQGKVVAVIDTGIDPAHQSMRISDVSTAKVKSKEDMLARQKAAGINYGSWINDKVVFAHNYVENSDNIKENQFEDFDEDWENFEFDADAEPKAIKKHKIYRPQSTQAPKETVIKTEETDGSHDIDWTQTDDDTKYESHGMHVTGIVAGNSKEAAATGERFLGIAPEAQVMFMRVFANDVMGSAESLFIKAIEDAVALGADVINLSLGTANGAQLSGSKPLMEAIEKAKKAGVSVVVAAGNERVYGSDHDDPLATNPDYGLVGSPSTGRTPTSVAAINSKWVIQRLMTVKELENRADLNHGKAIYSESVDFKNIKDSLGYDKSHQFAYVKESTDAGYKAQDVKDKIALIERDPNKTYDEMIALAKKHGALGVLIFNNKPGQSNRSMRLTANGMGIPSAFISHEFGKAMSQLNGNGTGSLEFDSVVSKAPSQKGNEMNHFSNWGLTSDGYLKPDITAPGGDIYSTYNDNHYGSQTGTSMASPQIAGASLLVKQYLEKTQPNLPKEKIADIVKNLLMSNAQIHVNPETKTTTSPRQQGAGLLNIDGAVTSGLYVTGKDNYGSISLGNVTDTMTFDVTVHNLSNKAKTLRYDTELLTDHVDPQKGRFTLTSRSLKTYQGGEVTVPANGKVTVRVTMDVSQFTKELTKQMPNGYYLEGFVRFRDSQDAQLNRVNIPFVGFKGQFENLAVAEESIYRLKSQGKTGFYFDESGPKDDIYVGKHFTGLVTLGSETNVSTKTISDNGLHTLGTFKNADGKFILEKNAQGNPVLAISPNGDNNQDFAAFKGVFLRKYQGLKASVYHASDKEHKNPLWVSPESFKGDKNFNSDIRFAKSTTLLGTAFSGKSLTGAELPDGYYHYVVSYYPDVVGAKRQEMTFDMILDRQKPVLSQATFDPETNRFKPEPLKDRGLAGVRKDSVFYLERKDNKPYTVTINDSYKYVSVEDNKTFVERQADGSFILPLDKAKLGDFYYMVEDFAGNVAIAKLGDHLPQTLGKTPIKLKLTDGNYQTKETLKDNLEMTQSDTGLVTNQAQLAVVHRNQPQSQLTKMNQDFFISPNEDGNKDFVAFKGLKNNVYNDLTVNVYAKDDHQKQTPIWSSQAGASASAIESTAWYGITARGSKVMPGDYQYVVTYRDEHGKEHQKQYTISVNDKKPMITQGRFDTINGVDHFTPDKTKALGSSGIVREEVFYLAKKNGRKFDVTEGKDGITVSDNKVYIPKNPDGSYTISKRDGVTLSDYYYLVEDRAGNVSFATLRDLKAVGKDKAVVNFGLDLPVPEDKQIVNFTYLVRDADGKPIENLEYYNNSGNSLILPYGKYTVELLTYDTNAAKLESDKIVSFTLSADNNFQQVTFKMTMLATSQITAHFDHLLPEGSRVSLKTAQGQLIPLEQSLYVPKAYGKTVQEGTYEVVVSLPKGYRIEGNTKVNALPNEVHELSLRLVKVGDASDSTGDHKVMSKNNSQALTASARPTKTTTSATAKALPSAGEKMGLKLRIVGLVLLGLTCVFSRKKSTKE

SEQ ID NO: 9 - protein, 1645 aa, Streptococcus pyogenes
VEKKQRFSLRKYKSGTFSVLIGSVFLVMTTTVAADELSTMSEPTITNHAQQQAQHLTNTELSSAESKTQDTSQITPKTNREKEQPQGLVSEPTTTELADTDAASMADTGPDATQKSASLPPVNTDVHDWVKTKGAWDKGYKGQGKVVAVIDTGIDPAHQSMRISDVSTAKVKSKEDMLARQKAAGINYGSWINDKVVFAHNYVENSDNIKENQFGDFDEDWENFEFDAEPKAIKKNKIYRPQSTQAPKETVIKTEETDGSHDIDWTQTDDETKYESHGMHVTGIVAGNSKEAAATGERFLGIAPEAQVMFMRVFANDVMGSAESLFIKAIEDAVALGADVINLSLGTANGAQLSGSKPLMEAIEKAKKAGVSVVVAAGNERVYGSDHDDPLATNPDYGLVGSPSTGRTPTSVAAINSKWVIQRLMTVKELENRADLNHGKAIYSESVDFKNIKDSLGYDKSHQFAYVKESTDAGYKAQDVKDKIALIERDPNKTYDEMIALAKKHGALGVLIFNNKPGQSNRSMRLTANGMGIPSAFISHEFGKAMSQLNGNGTGSLEFDSVVSKAPSQKGNEMNHFSNWGLTSDGYLKPDITAPGGDIYSTYNDNHYGSQTGTSMASPQIAGASLLVKQYLEKTQPNLPKEKIADIVKNLLMSNAQIHVNPETKTTTSPRQQGAGLLNIDGAVTSGLYVTGKDNYGSISLGNITDTMTFDVTVHNLSNKAKTLRYDTELLTDHVDPQKGRFTLTSRSLKTYQGGEVTVPANGKVTVRVTMDVSQFTKELTKQMPNGYYLEGFVRFRDSQDDQLNRVNIPFVGFKGQFENLAVAEESIYRLKSQGKTGFYFDESGPKDDIYVGKHFTGLVTLGSETNVSTKTISDNGLHTLGTFKNADGKFILEKNAQGNPVLAISPNGDNNQDFAAFKGVFLRKYQGLKASVYHASDKEHKNPLWVSPESFKGDKNFNSDIRFAKSTTLLGTAFSGKSLTGAELPDGHYHYVVSYYPDVVGAKRQEMTFDMILDRQKPVLSQATFDPETNRFKPEPLKDRGLAGVRKDSVFYLERKDNKPYTVTINDSYKYVSVADNKTFVERQADGSFILPLDKAKLGDFYYMVEDFAGNVAIAKLGDHLPQTLGKTPIKLKLTDGNYQTKETLKDNLEMTQSDTGLVTNQAQLAVVHRNQPQSQLTKMNQDFFISPNEDGNKDFVAFKGLKNNVYNDLTVNVYAKDDHQKQTPIWSSQAGASASAIESTAWYGITARGSKVMPGDYQYVVTYRDEHGKEHQKQYTISVNDKKPMITQGRFDTINGVDHFTPDKTKALGSSGIVREEVFYLAKKNGRKFDVTEGKDGITVSDNKVYIPKNPDGSYTISKRDGVTLSDYYYLVEDRAGNVSFATLRDLKAVGKDKAVVNFGLDLPVPEDKQIVNFTYLVRDADGKPIENLEYYNNSGNSLILPYGKYTVELLTYDTNAAKLESDKIVSFTLSADNNFQQVTFKMTMLATSQITAHFDHLLPEGSRVSLKTAQGQLIPLEQSLYVPKAYGKTVQEGTYEVVVSLPKGYRIEGNTKVNTLPNEVHELSLRLVKVGDASDSTGDHKVMSKNNSQALTASATPTKTTTSATAKALPSAGEKMGLKLRIVGLVLLGLTCVFSRKKSTKD

SEQ ID NO: 10 - protein, 1646 aa, Streptococcus pyogenes
VEKKQRFSLRKYKSGTFSVLIGSVFLMMTTTVAADELSTMSEPTITNHTQQQAQHLTNTELSSAESKSQDTSQITPKTNREKEQPQGLVSEPTTELADTDAAPMANTGPDATQKSASLPPVNTDVHDWVKTKGAWDKGYKGQGKVVAVIDTGIDPAHQSMRISDVSTAKVKSKEDMLARQKAAGINYGSWINDKVVFAHNYVENSDNIKENQFGDFDEDWENFEFDAEAEPKAIKKHKIYRPQSTQAPKETVIKTEETDGSHDIDWTQTDDDTKYESHGMHVTGIVAGNSKEAAATGERFLGIAPEAQVMFMRVFANDVMGSAESLFIKAIEDAVALGADVINLSLGTANGAQLSGSKPLMEAIEKAKKAGVSVVVAAGNERVYGSDHDDPLATNPDYGLVGSPSTGRTPTSVAAINSKWVIQRLMTVKELENRADLNHGKAIYSESVDFKNIKDSLGYDKSHQFAYVKESTDAGYKAQDVKGKIALIERDPNKTYDEMIALAKKHGALGVLIFNNKPGQSNRSMRLTANGMGIPSAFISHEFGKAMSQLNGNGTGSLEFDSVVSKAPSQKGNEMNHFSNWGLTSDGYLKPDITAPGGDIYSTYNDNHYGSQTGTSMASPQIAGASLLVKQYLEKTQPNLPKEKIADIVKNLLMSNAQIHVNPETKTTTSPRQQGAGLLNIDGAVTSGLYVTGKDNYGSISLGNITDTMTFDVTVHNLSNKAKTLRYDTELLTDHVDPQKGRFTLTSRSLKTYQGGEVTVPANGKVTVKVTMDVSQFTKELTKQMPNGYYLEGFVRFRDSQDAQLNRVNIPFVGFKGQFENLAVAEESIYRLKSQGKTGFYFDESGPKDDIYVGKHFTGLVTLGSETNVSTKTISDNGLHTLGTFKNADGKFILEKNAQGNPVLAISPNGDNNQDFAAFKGVFLRKYQGLKASVYHASDKEHKNPLWVSPESFKGDKNFNSDIRFAKSTTLLGTAFSGKSLTGAELPDGYYHYVVSYYPDVVGAKRQEMTFDMILDRQKPVLSQATFDPETNRFKPEPLKDRGLAGVRKDSVFYLERKDNKPYTVTINDSYKYVSVADNKTFVERQADGSFILPLDKAKLGDFYYMVEDFAGNVAIAKLGDHLPQTLGKTPIKLKLTDGNYQTKETLKDNLEMTQSDTGLVTNQAQLAVVHRNQPQSQLTKMNQDFFISPNEDGNKDFVAFKGLKNNVYNDLTVNVYAKDDHQKQTPIWSSQAGASASAIESTAWYGITARGSKVMPGDYQYVVTYRDEHGKEHQKQYTISVNDKKPMITQGRFDTINGVDHFTPDKTKALGSSGIVREEVFYLAKKNGRKFDVTEGKDGITVSDNKVYIPKNPDGSYTISKRDGVTLSDYYYLVEDRAGNVSFATLRDLKAVGKDKAVVNFGLDLPVPEDKQIVNFTYLVRDADGKPIENLEYYNNSGNSLILPYGKYTVELLTYDTNAAKLESDKIVSFTLSADNNFQQVTFKMTMLATSQITAHFDHLLPEGSRVSLKTAQGQLIPLEQSLYVPKAYGKTVQEGTYEVVVSLPKGYRIEGNTKVNTLPNEVHELSLRLVKVGDASDSTGDHKVMSKNNSQALTASATPTKTTTSATAKALPSAGEKMGLKLRIVGLVLLGLTCVFSRKKSTKD

SEQ ID NO: 11 - protein, 1647 aa, Streptococcus pyogenes
VEKKQRFSLRKYKSGTFSVLIGSVFLMMMTTTTVAADELTTTSEPTITNHAQQQAQHLTNTELSSAESQSPDTSQITPKTNREKEQPQGLVSEPTTTELADTDAASMANTGPDATQKSASLPPVNTDVHDWVKTKGAWDKGYKGQGKVVAVIDTGIDPAHQSMRISDVSTAKVKSKEDMLARQKAAGINYGSWINDKVVFAHNYVENSDNIKENQFGDFDEDWENFEFDAEPKAIKKNKIYRPQSTQAPKETVIKTEETDGSHDIDWTQTDDDTKYESHGMHVTGIVAGNSKEAAATGERFLGIAPEAQVMFMRVFANDVMGSAESLFIKAIEDAVALGADVINLSLGTANGAQLSGSKPLMEAIEKAKKAGVSVVVAAGNERVYGSDHDDPLATNPDYGLVGSPSTGRTPTSVAAINSKWVIQRLMTAKELENRADLNHGKAIYSESVDFKNIKDSLGYDKSHQFAYVKESTDAGYKAQDVKDKIALIERDPNKTYDEMIALAKKHGALGVLIFNNKPGQSNRSMRLTANGMGIPSAFISHEFGKAMSQLNGNGTGSLEFDSVVSKAPSQKGNEMNHFSNWGLTSDGYLKPDITAPGGDIYSTYNDNHYGSQTGTSMASPQIAGASLLVKQYLEKTQPNLPKEKIADIVKNLLMSNAQIHVNPETKTTTSPRQQGAGLLNIDGAVTSGLYVTGKDNYGSISLGNITDTMTFDVTVHNLSNKDKTLRYDTELLTDHVDPQKGRFTLTSRSLKTYQGGEVTVPANGKVTVRVTMDVSQFTKELTKQMPNGYYLEGFVRFRDSQDDQLNRVNIPFVGFKGQFENLAVAEESIYRLKSQGKTGFYFDESGPKDDIYVGKHFTGLVTLGSETNVSTKTISDNGLHTLGTFKNADGKFILEKNAQGNPVLAISPNGDNNQDFAAFKGVFLRKYQGLKASVYHASDKEHKNPLWVSPESFKGDKNFNSDIRFAKSTTLLGTAFSGKSLTGAELPDGYYHYVVSYYPDVVGAKRQEMTFDMILDRQKPVLSQATFDPETNRFKPEPLKDRGLAGVRKDSVFYLERKDNKPYTVTINDSYKYVSVEDNKTFVERQADGSFILPLDKAKLGDFYYMVEDFAGNVAIAKLGDHLPQTLGKTPIKLKLTDGNYQTKETLKDNLEMTQSDTGLVTNQAQLAVVHRNQPQSQLTKMNQDFFISPNEDGNKDFVAFKGLKNNVYNDLTVNVYAKDDHQKQTPIWSSQAGASASAIESTAWYGITARGSKVMPGDYQYVVTYRDEHGKEHQKQYTISVNDKKPMITQGRFDTINGVDHFTPDKTKALGSSGIVREEVFYLAKKNGRKFDVTEGKDGITVSDNKVYIPKNPDGSYTISKRDGVTLSDYYYLVEDRAGNVSFATLRDLKAVGKDKAVVNFGLDLPVPEDKQIVNFTYLVRDADGKPIENLEYYNNSGNSLILPYGKYTVELLTYDTNAAKLESDKIVSFTLSADNNFQQVTFKMTMLATSQITAHFDHLLPEGSRVSLKTAQGQLIPLEQSLYVPKAYGKTVQEDTYEVVVSLPKGYRIEGNTKVNTLPNEVHELSLRLVKVGDASDSTGDHKVMSKNNSQALTASATPTKTTTSATAKALPSTGEKMGLKLRIVGLVLLGLTCVFSRKKSTKD

SEQ ID NO: 12 - protein, 1647 aa, Streptococcus pyogenes
VEKKQRFSLRKYKSGTFSVLIGSVFLMMMTTTTVAADELTTTSEPTITNHAQQQAQHLTNTELSSAESQSPDTSQITPKTNREKEQPQGLVSEPTTTELADTDAASMANTGPDATQKSASLPPVNTDVHDWVKTKGAWDKGYKGQGKVVAVIDTGIDPAHQSMRISDVSTAKVKSKEDMLARQKAAGINYGSWINDKVVFAHNYVENSDNIKENQFGDFDEDWENFEFDAEPKAIKKNKIYRPQSTQAPKETVIKTEETDGSHDIDWTQTDDDTKYESHGMHVTGIVAGNSKEAAATGERFLGIAPEAQVMFMRVFANDVMGSAESLFIKAIEDAVALGADVINLSLGTANGAQLSGSKPLMEAIEKAKKAGVSVVVAAGNERVYGSDHDDPLATNPDYGLVGSPSTGRTPTSVAAINSKWVIQRLMTAKELENRADLNHGKAIYSESVDFKNIKDSLGYDKSHQFAYVKESTDAGYKAQDVKDKIALIERDPNKTYDEMIALAKKHGALGVLIFNNKPGQSNRSMRLTANGMGIPSAFISHEFGKAMSQLNGNGTGSLEFDSVVSKAPSQKGNEMNHFSNWGLTSDGYLKPDITAPGGDIYSTYNDNHYGSQTGTSMASPQIAGASLLVKQYLEKTQPNLPKEKIADIVKNLLMSNAQIHVNPETKTTTSPRQQGAGLLNIDGAVTSGLYVTGKDNYGSISLGNITDTMTFDVTVHNLSNKDKTLRYDTELLTDHVDPQKGRFTLTSRSLKTYQGGEVTVPANGKVTVRVTMDVSQFTKELTKQMPNGYYLEGFVRFRDSQDDQLNRVNIPFVGFKGQFENLAVAEESIYRLKSQGKTGFYFDESGPKDDIYVGKHFTGLVTLGSETNVSTKTISDNGLHTLGTFKNADGKFILEKNAQGNPVLAISPNGDNNQDFAAFKGVFLRKYQGLKASVYHASDKEHKNPLWVSPESFKGDKNFNSDIRFAKSTTLLGTAFSGKSLTGAELPDGYYHYVVSYYPDVVGAKRQEMTFDMILDRQKPVLSQATFDPETNRFKPEPLKDRGLAGVRKDSVFYLERKDNKPYTVTINDSYKYVSVEDNKTFVERQADGSFILPLDKAKLGDFYYMVEDFAGNVAIAKLGDHLPQTLGKTPIKLKLTDGNYQTKETLKDNLEMTQSDTGLVTNQAQLAVVHRNQPQSQLTKMNQDFFISPNEDGNKDFVAFKGLKNNVYNDLTVNVYAKDDHQKQTPIWSSQAGASASAIESTAWYGITARGSKVMPGDYQYVVTYRDEHGKEHQKQYTISVNDKKPMITQGRFDTINGVDHFTPDKTKALGSSGIVREEVFYLAKKNGRKFDVTEGKDGITVSDNKVYIPKNPDGSYTISKRDGVTLSDYYYLVEDRAGNVSFATLRDLKAVGKDKAVVNFGLDLPVPEDKQIVNFTYLVRDADGKPIENLEYYNNSGNSLILPYGKYTVELLTYDTNAAKLESDKIVSFTLSADNNFQQVTFKMTMLATSQITAHFDHLLPEGSRVSLKTAQGQLIPLEQSLYVPKAYGKTVQEDTYEVVVSLPKGYRIEGNTKVNALPNEVHELSLRLVKVGDASDSTGDHKVMSKNNSQALTVSATPTKTTTSATAKALPSAGEKMGLKLRIVGLVLLGLTCVFSRKKSTKD

SEQ ID NO: 13 - protein, 1647 aa, Streptococcus pyogenes; identical to SEQ ID NO: 12

SEQ ID NO: 14 - protein, 1647 aa, Streptococcus pyogenes
VEKKQRFSLRKYKSGTFSVLIGSVFLMMMTTTTVAADELTTTSEPTITNHAQQQAQHLTNTELSSAESQSPDTSQITPKTNREKEQPQGLVFEPTTTELADTDAASMANTGPDATQKSASLPPVNTDVHDWVKTKGAWDKGYKGQGKVVAVIDTGIDPAHQSMRISDVSTAKVKSKEDMLARQKAAGINYGSWINDKVVFAHNYVENSDNIKENQFGDFDEDWENFEFDAEPKAIKKNKIYRPQSTQAPKETVIKTEETDGSHDIDWTQTDDDTKYESHGMHVTGIVAGNSKEAAATGERFLGIAPEAQVMFMRVFANDVMGSAESLFIKAIEDAVALGADVINLSLGTANGAQLSGSKPLMEAIEKAKKAGVSVVVAAGNERVYGSDHDDPLATNPDYGLVGSPSTGRTPTSVAAINSKWVIQRLMTAKELENRADLNHGKAIYSESVDFKNIKDSLGYDKSHQFAYVKESTDAGYKAQDVKDKIALIERDPNKTYDEMIALAKKHGALGVLIFNNKPGQSNRSMRLTANGMGIPSAFISHEFGKAMSQLNGNGTGSLEFDSVVSKAPSQKGNEMNHFSNWGLTSDGYLKPDITAPGGDIYSTYNDNHYGSQTGTSMASPQIAGASLLVKQYLEKTQPNLPKEKIADIVKNLLMSNAQIHVNPETKTTTSPRQQGAGLLNIDGAVTSGLYVTGKDNYGSISLGNITDTMTFDVTVHNLSNKDKTLRYDTELLTDHVDPQKGRFTLTSRSLKTYQGGEVTVPANGKVTVRVTMDVSQFTKELTKQMPNGYYLEGFVRFRDSQDDQLNRVNIPFVGFKGQFENLAVAEESIYRLKSQGKTGFYFDESGPKDDIYVGKHFTGLVTLGSETNVSTKTISDNGLHTLGTFKNADGKFILEKNAQGNPVLAISPNGDNNQDFAAFKGVFLRKYQGLKASVYHASDKEHKNPLWVSPESFKGDKNFNSDIRFAKSTTLLGTAFSGKSLTGAELPDGYYHYVVSYYPDVVGAKRQEMTFDMILDRQKPVLSQATFDPETNRFKPEPLKDRGLAGVRKDSVFYLERKDNKPYTVTINDSYKYVSVEDNKTFVERQADGSFILPLDKAKLGDFYYMVEDFAGNVAIAKLGDHLPQTLGKTPIKLKLTDGNYQTKETLKDNLEMTQSDTGLVTNQAQLAVVHRNQPQSQLTKMNQDFFISPNEDGNKDFVAFKGLKNNVYNDLTVNVYAKDDHQKQTPIWSSQAGASASAIESTAWYGITARGSKVMPGDYQYVVTYRDEHGKEHQKQYTISVNDKKPMITQGRFDTINGVDHFTPDKTKALGSSGIVREEVFYLAKKNGRKFDVTEGKDGITVSDNKVYIPKNPDGSYTISKRDGVTLSDYYYLVEDRAGNVSFATLRDLKAVGKDKAVVNFGLDLPVPEDKQIVNFTYLVRDADGKPIENLEYYNNSGNSLILPYGKYTVELLTYDTNAAKLESDKIVSFTLSADNNFQQVTFKMTMLATSQITAHFDHLLPEGSRVSLKTAQGQLIPLEQSLYVPKAYGKTVQEDTYEVVVSLPKGYRIEGNTKVNALPNEVHELSLRLVKVGDASDSTGDHKVMSKNNSQALTVSATPTKTTTSATAKALPSAGEKMGLKLRIVGLVLLGLTCVFSRKKSTKD

SEQ ID NO: 15 - protein, 1646 aa, Streptococcus pyogenes
VEKKQRFSLRKYKSGTFSVLIGSVFLMMMTTTVAADELTTTSEPTITNHAQQQAQHLTNTELSSAESQSPDTSQITPKTNREKEQPQGLVSEPTTTELADTDAASMANTGPDATQKSASLPPVNTDVHDWVKTKGAWDKGYKGQGKVVAVIDTGIDPAHQSMRISDVSTAKVKSKEDMLARQKAAGINYGSWINDKVVFAHNYVENSDNIKENQFEDFDEDWENFEFDAEPKAIKKNKIYRPQSTQAPKETVIKTEETDGSHDIDWTQTDDETKYESHGMHVTGIVAGNSKEAAATGERFLGIAPEAQVMFMRVFANDVMGSAESLFIKAIEDAVALGADVINLSLGTANGAQLSGSKPLMEAIEKAKKAGVSVVVAAGNERVYGSDHDDPLATNPDYGLVGSPSTGRTPTSVAAINSKWVIQRLMTVKELENRADLNHGKAIYSESVDFKDIKDSLGYDKSHQFAYVKESTDAGYNAQDVKGKIALIERDPNKTYDEMIALAKKHGALGVLIFNNKPGQSNRSMRLTSNGMGIPSAFISHEFGKAMSQLNGNGTGSLEFDSVVSKAPSQKGNEMNHFSNWGLTSDGYLKPDITAPGGDIYSTYNDNHYGSQTGTSMASPQIAGASLLVKQYLEKTQPNLPKEKIADIVKNLLMSNAQIHVNPETKTTTSPRQQGAGLLNIDGAVTSGLYVTGKDNYGSISLGNITDTMTFDVTVHNLSNKDKTLRYDTELLTDHVDPQKGRFTLTSRSLKTYQGGEVTVPANGKVTVRVTMDVSQFTKELTKQMPNGYYLEGFVRFRDSQDDQLNRVNIPFVGFKGQFENLAVAEESIYRLKSQGKTGFYFDESGPKDDIYVGKHFTGLVTLGSETNVSTKTISDNGLHTLGTFKNADGKFILEKNAQGNPVLAISPNGDNNQDFAAFKGVFLRKYQGLKASVYHASDKEHKNPLWVSPESFKGDKNFNSDIRFAKSTTLLGTAFSGKSLTGAELPDGYYHYVVSYYPDVVGAKRQEMTFDMILDRQKPVLSQATFDPETNRFKPEPLKDRGLAGVRKDSVFYLERKDNKPYTVTINDSYKYVSVEDNKTFVERQADGSFILPLDKAKLGDFYYMVEDFAGNVAIAKLGDHLPQTLGKTPIKLKLTDGNYQTKETLKDNLEMTQSDTGLVTNQAQLAVVHRNQPQSQLTKMNQDFFISPNEDGNKDFVAFKGLKNNVYNDLTVNVYAKDDHQKQTPIWSSQAGASASAIESTAWYGITARGSKVMPGDYQYVVTYRDEHGKVHQKQYTISVNDKKPMITQGRFDTINGVDHFTPDKTKALGSSGIVREEVFYLAKKNGRKFDVTEGKDGITVSDNKVYIPKNPDGSYTISKRDGVTLSDYYYLVEDRAGNVSFATLRDLKAVGKDKAVVNFGLDLPVPEDKQIVNFTYLVRDADGKPIENLEYYNNSGNSLILPYGKYTVELLTYDTNAAKLESDKIVSFTLSADNNFQQVTFKMTMLATSQITAHFDHLLPEGSRVSLKTAQGQLIPLEQSLYVPKAYGKTVQEGTYEVVVSLPKGYRIEGNTKVNALPNEVHELSLRLVKVGDASDSTGDHKVMSKNNSQALTASATPTKTTTSATAKALPSTGEKMGLKLRIVGLVLLGLTCVFSRKKSTKD

SEQ ID NO: 16 - protein, 1647 aa, Streptococcus pyogenes
VEKKQRFSLRKYKSGTFSVLIGSVFLMMMMTTTVAADELTTTSEPTITNHAQQQAQHLTNTELSSAESQSPDTSQITPKTNREKEQPQGLVSEPTTTELADTDAASMANTGPDATQKSASLPPVNTDVHDWVKTKGAWDKGYKGQGKVVAVIDTGIDPAHQSMRISDVSTAKVKSKEDMLARQKAAGINYGSWINDKVVFAHNYVENSDNIKENQFEDFDEDWENFEFDAEPKAIKKNKIYRPQSTQAPKETVIKTEETDGSHDIDWTQTDDETKYESHGMHVTGIVAGNSKEAAATGERFLGIAPEAQVMFMRVFANDVMGSAESLFIKAIEDAVALGADVINLSLGTANGAQLSGSKPLMEAIEKAKKAGVSVVVAAGNERVYGSDHDDPLATNPDYGLVGSPSTGRTPTSVAAINSKWVIQRLMTVKELENRADLNHGKAIYSESVDFKDIKDSLGYDKSHQFAYVKESTDAGYNAQDVKGKIALIERDPNKTYDEMIALAKKHGALGVLIFNNKPGQSNRSMRLTSNGMGIPSAFISHEFGKAMSQLNGNGTGSLEFDSVVSKAPSQKGNEMNHFSNWGLTSDGYLKPDITAPGGDIYSTYNDNHYGSQTGTSMASPQIAGASLLVKQYLEKTQPNLPKEKIADIVKNLLMSNAQIHVNPETKTTTSPRQQGAGLLNIDGAVTSGLYVTGKDNYGSISLGNITDTMTFDVTVHNLSNKDKTLRYDTELLTDHVDPQKGRFTLTSRSLKTYQGGEVTVPANGKVTVRVTMDVSQFTKELTKQMPNGYYLEGFVRFRDSQDDQLNRVNIPFVGFKGQFENLAVAEESIYRLKSQGKTGFYFDESGPKDDIYVGKHFTGLVTLGSETNVSTKTISDNGLHTLGTFKNADGKFILEKNAQGNPVLAISPNGDNNQDFAAFKGVFLRKYQGLKASVYHASDKEHKNPLWVSPESFKGDKNFNSDIRFAKSTTLLGTAFSGKSLTGAELPDGYYHYVVSYYPDVVGAKRQEMTFDMILDRQKPVLSQATFDPETNRFKPEPLKDRGLAGVRKDSVFYLERKDNKPYTVTINDSYKYVSVEDNKTFVERQADGSFILPLDKAKLGDFYYMVEDFAGNVAIAKLGDHLPQTLGKTPIKLKLTDGNYQTKETLKDNLEMTQSDTGLVTNQAQLAVVHRNQPQSQLTKMNQDFFISPNEDGNKDFVAFKGLKNNVYNDLTVNVYAKDDHQKQTPIWSSQAGASASAIESTAWYGITARGSKVMPGDYQYVVTYRDEHGKVHQKQYTISVNDKKPMITQGRFDTINGVDHFTPDKTKALGSSGIVREEVFYLAKKNGRKFDVTEGKDGITVSDNKVYIPKNPDGSYTISKRDGVTLSDYYYLVEDRAGNVSFATLRDLKAVGKDKAVVNFGLDLPVPEDKQIVNFTYLVRDADGKPIENLEYYNNSGNSLILPYGKYTVELLTYDTNAAKLESDKIVSFTLSADNNFQQVTFKMTMLATSQITAHFDHLLPEGSRVSLKTAQGQLIPLEQSLYVPKAYGKTVQEGTYEVVVSLPKGYRIEGNTKVNALPNEVHELSLRLVKVGDASDSTGDHKVMSKNNSQALTASATPTKTTTSATAKALPSTGEKMGLKLRIVGLVLLGLTCVFSRKKSTKD

SEQ ID NO: 17 - protein, 1645 aa, Streptococcus pyogenes
VEKKQRFSLRKYKSGTFSVLIGSVFLMMTTTVAADELTTTSEPTITNHAQQQAPPLTNTELSSAESQPQDTSQVTPETNREKEQPQGLVSEPTTTELADTDAAPMANTGSDATQKSASLPPVNTDVHDWVKTKGAWDKGYKGQGKVVAVIDTGIDPAHQSMRISDVSTAKVKSKEDMLARQKAAGINYGSWINDKVVFAHNYVENSDNIKENQFGDFDEDWENFEFDAEPKAIKKNKIYRPQSTQAPKETVIKTEETDGSHDIDWTQTDDETKYESHGMHVTGIVAGNSKEAAATGERFLGIAPEAQVMFMRVFANDVMGSAESLFIKAIEDAVALGADVINLSLGTANGAQLSGSKPLIEAIEKAKKAGVSVVVAAGNERVYGSDHDDPLATNPDYGLVGSPSTGRTPTSVAAINSKWVIQRLMTVKELENRADLNHGKAIYSESVDFKDIKDSLGYDKSHQFAYVKESTDAGYKAQDVKGKIALIERDPNKTYDEMIALAKKHGALGVLIFNNKPGQSNRSMRLTANGMGIPSAFISYEFGKAMSQLNGNGTGSLEFDSVVSKAPSQKGNEMNHFSNWGLTSDGYLKPDITAPGGDIYSTYNDNHYGSQTGTSMASPQIAGASLLVKQYLEKTQPNLPKEKIADIVKNLLMSNAQIHVNPETKTTTSPRQQGAGLLNIDGAVTSGLYVTGKDNYGSISLGNITDTMTFDVTVHNLSNKAKTLRYDTELLTDHVDPQKGRFTLTSRSLKTYQGGEVTVPANGKVTVRVTMDVSQFTKELTKQMPNGYYLEGFVRFRDSQDDQLNRVNIPFVGFKGQFENLAVAEESIYRLKSQGKTGFYFDESGPKDDIYVGKHFTGLVTLGSETNVSTKTISDNGLHTLGTFKNADGKFILEKNAQGNPVLAISPNGDNNQDFAAFKGVFLRKYQGLKASVYHASDKEHKNPLWVSPESFKGDKNFNSDIRFAKSTTLLGTAFSGKSLTGAELPDGYYHYVVSYYPDVVGAKRQEMTFDMILDRQKPVLSQATFDPETNRFKPEPLKDRGLAGVRKDSVFYLERKDNKPYTVTINDSYKYVSVADNKTFVERQADGSFILPLDKAKLGDFYYMVEDFAGNVAIAKLGDHLPQTLGKTPIKLKLTDGNYQTKETLKDNLEMTQSDTGLVTNQAQLAVVHRNQPQSQLTKMNQDFFISPNEDGNKDFVAFKGLKNNVYNDLTVNVYAKDDHQKQTPIWSSQAGASASAIESTAWYGITARGSKVMPGDYQYVVTYRDEHGKEHQKQYTISVNDKKPMITQGRFDTINGVDHFTPDKTKALGSSGIVREEVFYLAKKNGRKFDVTEGKDGITVSDNKVYIPKNPDGSYTISKRDGVTLSDYYYLVEDRAGNVSFATLRDLKAVGKDKAVVNFGLDLPVPEDKQIVNFTYLVRDADGKPIENLEYYNNSGNSLILPYGKYTVELLTYDTNAAKLESDKIVSFTLSADNNFQQVTFKMTMLATSQITAHFDHLLPEGSRVSLKTAQGQLIPLEQSLYVPKAYGKTVQEGTYEVVVSLPKGYRIEGNTKVNALPNEVHELSLRLVKVGDASDSTGDHKVMSKNNSQALTASATPTKTTTSATAKALPSTGEKMGLKLRIVGLVLLGLTCVFSRKKSTKD

SEQ ID NO: 18 - protein, 1645 aa, Streptococcus pyogenes; identical to SEQ ID NO: 17

SEQ ID NO: 19 - protein, 1645 aa, Streptococcus pyogenes
VEKKQRFSLRKYKSGTFSVLIGSVFLMMTTTVAADELTTTSEPTITNHAQQQAQPLTNTELSSAESQSPHTSQVTPETNREKEQSQDLVSKPTTTELADTDAAPMANTGPDATQKSASLPPVNTDVHDWVKTKGAWDKGYKGQGKVVAVIDTGIDPAHQSMHISDVSTAKVKSKEDMLARQKAAGINYGSWINDKVVFAHNYVENSDNIKENQFGDFDEDWENFEFDAEPKAIKKHKIYRPQSTQAPKETVIKTEETDGSHDIDWTQTDDETKYESHGMHVTGIVAGNSKEAAATGERFLGIAPEAQVMFMRVFANDVMGSAESLFIKAIEDAVALGADVINLSLGTANGAQLSGSKPLMEAIEKAKKAGVSVVVAAGNERVYGSDHDDPLATNPDYGLVGSPSTGRTPTSVAAINSKWVIQRLMTVKELENRADLNHGKAIYSESVDFKDIKDSLGYDKSHQFAYVKESTDAGYNAQDVKGKIALIERDPNKTYDEMIALAKKHGALGVLIFNNKPGQSNRSMRLTANGMGIPSAFISHEFGKAMSQLNGNGTGSLVFDSVVSKAPSQKGNEMNHFSNWGLTSDGYLKPDITAPGGDIYSTYNDNHYGSQTGTSMASPQIAGASLLVKQYLEKTQPNLPKEKIADIVKNLLMSNAQIHVNPETKTTTSPRQQGAGLLNIDGAVTSGLYVTGKDNYGSISLGNITDTMTFDVTVHNLSNKAKTLRYDTELLTDHVDPQKGRFTLTSRSLKTYQGGEVTVPANGKVTVKVTMDVSQFTKELTKQMPNGYYLEGFVRFRDSQDDQLNRVNIPFVGFKGQFENLAVAEESIYRLKSQGKTGFYFDESGPKDDIYVGKHFTGLVTLGSETNVSTKTISDNGLHTLGTFKNADGKFILEKNAQGNPVLAISPNGDNNQDFAAFKGVFLRKYQGLKASVYHASDKEHKNPLWVSPESFKGDKNFNSDIRFAKSTTLLGTAFSGKSLTGAELPDGYYHYVVSYYPDVVGAKRQEMTFDMILDRQKPVLSQATFDPETNRFKPEPLKDRGLAGVRKDSVFYLERKDNKPYTVTINDSYKYVSVEDNKTFVERQADGSFILPLDKAKLGDFYYMVEDFAGNVAIAKLGDHLPQTLGKTPIKLKLTDGNYQTKETLKDNLEMTQSDTGLVTNQAQLAVVHRNQPQSQLTKMNQDFFISPNEDGNKDFVAFKGLKNNVYNDLTVNVYAKDDHQKQTPIWSSQAGASASAIESTAWYGITARGSKVMPGDYQYVVTYRDEHGKEHQKQYTISVNDKKPMITQGRFDTINGVDHFTPDKTKALGSSGIVREEVFYLAKKNGRKFDVTEGKDGITVSDNKVYIPKNPDGSYTISKRDGVTLSDYYYLVEDRAGNVSFATLRDLKAVGKDKAVVNFGLDLPVPEDKQIVNFTYLVRDADGKPIENLEYYNNSGNSLILPYGKYTVELLTYDTNAAKLESDKIVSFTLSADNNFQQVTFKMTMLATSQITAHFDHLLPEGSRVSLKTAQGQLIPLEQSLYVPKAYGKTVQEGTYEVVVSLPKGYRIEGNTKVNALPNEVHELSLRLVKVGDASDLTGDHKVMSKNNSQALTASATPTKTTTSATAKALPSAGEKMGLKLRIVGLVLLGLTCVFSRKKSTKD

SEQ ID NO: 20 - protein, 1645 aa, Streptococcus pyogenes; identical to SEQ ID NO: 19

SEQ ID NO: 21 - protein, 1645 aa, Streptococcus pyogenes
VEKKQRFSLRKYKSGTFSVLIGSVFLMMTTTVAADELTTTSEPTITNHAQQQAQPLTNTELSSAESQSPHTSQVTPETNREKEQSQDLVSKPTTTELADTDAAPMANTGPDATQKSASLPPVNTDVHDWVKTKGAWDKGYKGQGKVVAVIDTGIDPAHQSMHISDVSTAKVKSKEDMLARQKAAGINYGSWINDKVVFAHNYVENSDNIKENQFGDFDEDWENFEFDAEPKAIKKHKIYRPQSTQAPKETVIKTEETDGSHDIDWTQTDDETKYESHGMHVTGIVAGNSKEAAATGERFLGIAPEAQVMFMRVFANDVMGSAESLFIKAIEDAVALGADVINLSLGTANGAQLSGSKPLMEAIEKAKKAGVSVVVAAGNERVYGFDHDDPLATNPDYGLVGSPSTGRTPTSVAAINSKWVIQRLMTVKELENRADLNHGKAIYSESVDFKDIKDSLGYDKSHQFAYVKESTDAGYNAQDVKGKIALIERDPNKTYDEMIALAKKHGALGVLIFNNKPGQSNRSMRLTANGMGIPSAFISHEFGKAMSQLNGNGTGSLVFDSVVSKAPSQKGNEMNHFSNWGLTSDGYLKPDITAPGGDIYSTYNDNHYGSQTGTSMASPQIAGASLLVKQYLEKTQPNLPKEKIADIVKNLLMSNAQIHVNPETKTTTSPRQQGAGLLNIDGAVTSGLYVTGKDNYGSISLGNITDTMTFDVTVHNLSNKAKTLRYDTELLTDHVDPQKGRFTLTSRSLKTYQGGEVTVPANGKVTVKVTMDVSQFTKELTKQMPNGYYLEGFVRFRDSQDDQLNRVNIPFVGFKGQFENLAVAEESIYRLKSQGKTGFYFDESGPKDDIYVGKHFTGLVTLGSETNVSTKTISDNGLHTLGTFKNADGKFILEKNAQGNPVLAISPNGDNNQDFAAFKGVFLRKYQGLKASVYHASDKEHKNPLWVSPESFKGDKNFNSDIRFAKSTTLLGTAFSGKSLTGAELPDGYYHYVVSYYPDVVGAKRQEMTFDMILDRQKPVLSQATFDPETNRFKPEPLKDRGLAGVRKDSVFYLERKDNKPYTVTINDSYKYVSVEDNKTFVERQADGSFILPLDKAKLGDFYYMVEDFAGNVAIAKLGDHLPQTLGKTPIKLKLTDGNYQTKETLKDNLEMTQSDTGLVTNQAQLAVVHRNQPQSQLTKMNQDFFISPNEDGNKDFVAFKGLKNNVYNDLTVNVYAKDDHQKQTPIWSSQAGASASAIESTAWYGITARGSKVMPGDYQYVVTYRDEHGKEHQKQYTISVNDKKPMITQGRFDTINGVDHFTPDKTKALGSSGIVREEVFYLAKKNGRKFDVTEGKDGITVSDNKVYIPKNPDGSYTISKRDGVTLSDYYYLVEDRAGNVSFATLRDLKAVGKDKAVVNFGLDLPVPEDKQIVNFTYLVRDADGKPIENLEYYNNSGNSLILPYGKYTVELLTYDTNAAKLESDKIVSFTLSADNNFQQVTFKMTMLATSQITAHFDHLLPEGSRVSLKTAQGQLIPLEQSLYVPKAYGKTVQEGTYEVVVSLPKGYRIEGNTKVNALPNEVHELSLRLVKVGDASDLTGDHKVMSKNNSQALTASATPTKTTTSATAKALPSAGEKMGLKLRIVGLVLLGLTCVFSRKKSTKD

SEQ ID NO: 22 - protein, 1647 aa, Streptococcus pyogenes
VEKKQRFSLRKYKSGTFSVLVGSVFLMMTTTVAADELTTTSEPTITNHAQQQAQPLTNTELSSAESQSPDTSQVTPETNREKEQSQDLVSKPTTTELADTDAAPMANTGPDATQKSASLPPVNTDVHDWVKTKGAWDKGYKGQGKVVAVIDTGIDPAHQSMRISDVSTAKVKSKEDMLARQKAAGINYGSWINDKVVFAHNYVENSDNIKENQFGDFDEDWENFEFDADAEPKAIKKHKIYRPQSTQAPKETVIKTEETDGSHDIDWTQTDDETKYESHGMHVTGIVAGNSKEAAATGERFLGIAPEAQVMFMRVFANDVMGSAESLFIKAIEDAVALGADVINLSLGTANGAQLSGSKPLMEAIEKAKKAGVSVVVAAGNERVYGSDHDDPLATNPDYGLVGSPSTGRTPTSVAAINSKWVIQRLMTVKELENRADLNHGKAIYSESVDFKDIKDSLGYDKSHQFAYVKESTDAGYNAQDVKGKIALIERDPNKTYDEMIALAKKHGALGVLIFNNKPGQSNRSMRLTANGMGIPSAFISHEFGKAMSQLNGNGTGSLEFDSVVSKAPSQKGNEMNHFSNWGLTSDGYLKPDITAPGGDIYSTYNDNHYGSQTGTSMASPQIAGASLLVKQYLEKTQPNLPKEKIADIVKNLLMSNAQIHVNPETKTTTSPRQQGAGLLNIDGAVTSGLYVTGKDNYGSISLGNITDTMTFDVTVHNLSNKDKTLRYDTELLTDHVDPQKGRFTLTSRSLKTYQGGEVTVPANGKVTVRVTMDVSQFTKELTKQMPNGYYLEGFVRFRDSQDDQLNRVNIPFVGFKGQFENLAVAEESIYRLKSQGKTGFYFDESGPKDDIYVGKHFTGLVTLGSETNVSTKTISDNGLHTLGTFKNADGKFILEKNAQGNPVLAISPNGDNNQDFAAFKGVFLRKYQGLKASVYHASDKEHKNPLWVSPESFKGDKNFNSDIRFAKSTTLLGTAFSGKSLTGAELPDGYYHYVVSYYPDVVGAKRQEMTFDMILDRQKPVLSQATFDPETNRFKPEPLKDRGLAGVRKDSVFYLERKDNKPYTVTINDSYKYVSVADNKTFVERQADGSFILPLDKAKLGDFYYMVEDFAGNVAIAKLGDHLPQTLGKTPIKLKLTDGNYQTKETLKDNLEMTQSDTGLVTNQAQLAVVHRNQPQSQLTKMNQDFFISPNEDGNKDFVAFKGLKNNVYNDLTVNVYAKDDHQKQTPIWSSQAGASASAIESTAWYGITARGSKVMPGDYQYVVTYRDEHGKEHQKQYTISVNDKKPMITQGRFDTINGVDHFTPDKTKALGSSGIVREEVFYLAKKNGRKFDVTEGKDGITVSDNKVYIPKNPDGSYTISKRDGVTLSDYYYLVEDRAGNVSFATLRDLKAVGKDKAVVNFGLDLPVPEDKQIVNFTYLVRDADGKPIENLEYYNNSGNSLILPYGKYTVELLTYDTNAAKLESDKIVSFTLSADNNFQQVTFKMTMLATSQITAHFDHLLPEGSRVSLKTAQGQLIPLGQSLYVPKAYGKTVQEGTYEVVVSLPKGYRIEGNTKVNALPNEVHELSLRLVKVGDASDSTGDHKVMSKNNSQALTASATPTKTTTSATAKALPSAGEKMGLKLRIVGLVLLGLTCVFSRKKSTKD

SEQ ID NO: 23 - protein, 1647 aa, Streptococcus pyogenes; identical to SEQ ID NO: 22

SEQ ID NO: 24 - protein, 1645 aa, Streptococcus pyogenes
VEKKQRFSLRKYKSGTFSVLIGSVFLMMTTTVAADELTTTSEPTITNHAQQQAQPLTNTELSSAESQSPDTSQITPKTNREKEQSQDLVSKPTTTELADTDSAPMANTGPDATQKSASLPPVNTDVHDWVKTKGAWDKGYKGQGKVVAVIDTGIDPAHQSMRISDVSTAKVKSKEDMLARQKAAGINYGSWINDKVVFAHNYVENSDNIKENQFGDFDEDWENFEFDAEPKAIKKHKIYRPQSTQAPKETVIKTEETDGSHDIDWTQTDDETKYESHGMHVTGIVAGNSKEAAATGERFLGIAPEAQVMFMRVFANDVMGSAESLFIKAIEDAVALGADVINLSLGTANGAQLSGSKPLMEAIEKAKKAGVSVVVAAGNERVYGSDHDDPLATNPDYGLVGSPSTGRTPTSVAAINSKWVIQRLMTVKELESRADLNHGKAIYSESVDFKDIKDSLGYDKSHQFAYVKESTDAGYKAQDVKGKIALIERDPNKTYDEMIALAKKHGALGVLIFNNKPGQSNRSMRLTANGMGIPSAFISHEFGKAMSQLNTNGTGSLVFDSVVSKAPSQKGNEMNHFSNWGLTSDGYLKPDITAPGGDIYSTYNDNHYGSQTGTSMASPQIAGASLLVKQYLEKTQPNLPKEKIADIVKNLLMSNAQIHVNPETKMTTSPRQQGAGLLNIDGAVTSGLYVTGKDNYGSISLGNITDTMTFDVTVHNLSNKAKTLRYDTELLTDHVDPQKGHFTLTSRSLKTYQGGEVTVPANGKVTVRVTMDVSQFTKELTKQMPNGYYLEGFVRFRDSQDDQLNRVNIPFVGFKGQFENLAVAEESIYRLKSQGKTGFYFDESGPKDDIYVGKHFTGLVTLGSETNVSTKTISDNGLHTLGTFKNADGKFILEKNAQGNPVLAISPNGDNNQDFAAFKGVFLRKYQGLKASVYHASDKEHKNPLWVSPESFKGDKNFNSDIRFAKSTTLLGTAFSGKSLTGAELPDGYYHYVVSYYPDVVGAKRQEMTFDMILDRQKPVLSQATFDPETNRFKPEPLKDRGLAGVRKDSVFYLERKDNKPYTVTINDSYKYVSVEDNKTFVERQADGSFILPLDKAKLGDFYYMVEDFAGNVAIAKLGDHLPQTLGKTPIKLKLTDGNYQTKETLKDNLEMTQSDTGLVTNQAQLAVVHRNQPQSQLTKMNQDFFISPNEDGNKDFVAFKGLKNNVYNDLTVNVYAKDDHQKQTPIWSSQAGASASAIESTAWYGITARGSKVMPGDYQYVVTYRDEHGKEHQKQYTISVNDKKPMITQGRFDTINGVDHFTPDKTKALGSSGIVREEVFYLAKKNGRKFDVTEGKDGITVSDNKVYIPKNPDGSYTISKRDGVTLSDYYYLVEDRAGNVSFATLRDLKAVGKDKAVVNFGLDLPVPEDKQIVNFTYLVRDADGKPIENLEYYNNSGNSLILPYGKYTVELLTYDTNAAKLESDKIVSFTLSADNNFQQVTFKMTMLATSQITAHFDHLLPEGSRVSLKTAQGQLIPLEQSLYVPKAYGKTVQEGTYEVVVSLPKGYRIEGNTKVNTLPNEVHELSLRLVKVGDASDSTGDHKVMSKNNSQALTASATPTKTTTSATAKALPSAGEKMGLKLRIVGLVLLGLTCVFSRKKSTKD

SEQ ID NO: 25 - protein, 1645 aa, Streptococcus pyogenes
VEKKQRFSLRKYKSGTFSVLIGSVFLMMTTTVAADELTTTSEPTITNHAQQQAQHLTNTELSSAESQSPDTSQITPKINREKEQPQGLVSEPTTTELADTDAAPMANTGPDATQKSASLPPVNTDVHDWVKTKGAWDKGYKGQGKVVAVIDTGIDPAHQSMRISDVSTAKVKSKEDMLARQKAAGINYGSWINDKVVFAHNYVENSDNIKENQFEDFDEDWENFEFDAEPKAIKKHKIYRPQSTQAPKETVIKTEETDGSHDIDWTQTDDDTKYESHGMHVTGIVAGNSKEAAATGERFLGIAPETQVMFMRVFANDVMGSAESLFIKAIEDAVALGADVINLSLGTANGAQLSGSKPLMEAIEKAKKAGVSVVVAAGNERVYGSDHDDPLATNPDYGLVGSPSTGRTPTSVAAINSKWVIQRLMTVKELENRADLNHGKAIYSESVDFKDIKDSLGYDKSHQFAYVKESTDAGYNAQDVKGKIALIERDPNKTYDEMIALAKKHGALGVLIFNNKPGQSNRSMRLTANGMGIPSAFISHEFGKAMSQLNGNGTGSLEFDSVVSKAPSQKGNEMNHFSNWGLTSDGYLKPDITAPGGDIYSTYNDNHYGSQTGTSMASPQIAGASLLVKQYLEKTQPNLPKEKIADIVKNLLMSNAQIHVNPETKTTTSPRQQGAGLLNIDGAVTSGLYVTGKDNYGSISLGNITDTMTFDVTVHNLSNKAKTLRYDTELLTDHVDPQKGRFTLTSRSLKTYQGGEVTVPANGKVTVRVTMDVSQFTKELTKQMPNGYYLEGFVRFRDSQDDQLNRVNIPFVGFKGQFENLAVAEESIYRLKSQGKTGFYFDESGPKDDIYVGKHFTGLVTLGSETNVSTKTISDNGLHTLGTFKNADGKFILEKNAQGNPVLAISPNGDNNQDFAAFKGVFLRKYQGLKASVYHASDKEHKNPLWVSPESFKGDKNFNSDIRFAKSTTLLGTAFSGKSLTGAELPDGYYHYVVSYYPDVVGAKRQEMTFDMILDRQKPVLSQATFDPETNRFKPEPLKDRGLAGVRKDSVFYLERKDNKPYTVTINDSYKYVSVEDNKTFVERQADGSFILPLDKAKLGDFYYMVEDFAGNVAIAKLGDHLPQTLGKTPIKLKLTDGNYQTKETLKDNLEMTQSDTGLVTNQAQLAVVHRNQPQSQLTKMNQDFFISPNEDGNKDFVAFKGLKNNVYNDLTVNVYAKDDHQKQTPIWSSQAGASASAIESTAWYGITARGSKVMPGDYQYVVTYRDEHGKEHQKQYTISVNDKKPMITQGRFDTINGVDHFTPDKTKALGSSGIVREEVFYLAKKNGRKFDVTEGKDGITVSDNKVYIPKNPDGSYTISKRDGVTLSDYYYLVEDRAGNVSFATLRDLKAVGKDKAVVNFGLDLPVPEDKQIVNFTYLVRDADGKPIENLEYYNNSGNSLILPYGKYTVELLTYDTNAAKLESDKIVSFTLSADNNFQQVTFKMTMLATSQITAHFDHLLPEGSRVSLKTAQGQLIPLEQSLYVPKAYGKTVQEGTYEVVVSLPKGYRIEGNTKVNTLPNEVHELSLRLVKVGDASDSTGDHKVMSKNNSQALTASATPTKTTTSATAKALPSAGEKMGLKLRIVGLVLLGLTCVFSRKKSTKD

SEQ ID NO: 26 - protein, 1645 aa, Streptococcus pyogenes; identical to SEQ ID NO: 25

SEQ ID NO: 27 - protein, 1645 aa, Streptococcus pyogenes; identical to SEQ ID NO: 25

SEQ ID NO: 28 - protein, 1645 aa, Streptococcus pyogenes; identical to SEQ ID NO: 25

SEQ ID NO: 29 - protein, 1645 aa, Streptococcus pyogenes
VEKKQRFSLRKYKSGTFSVLIGSVFLMMTTTVAADELTTTSEPTITNHAQQQAQHLTNTELSSAESQSPDTSQITPKINREKEQPQGLVSEPTTTELADTDAAPMANTGPDATQKSASLPPVNTDVHDWVKTKGAWDKGYKGQGKVVAVIDTGIDPAHQSMRISDVSTAKVKSKEDMLARQKAAGINYGSWINDKVVFAHNYVENSDNIKENQFEDFDEDWENFEFDAEPKAIKKHKIYRPQSTQAPKETVIKTEETDGSHDIDWTQTDDDTKYESHGMHVTGIVAGNSKEAAATGERFLGIAPETQVMFMRVFANDVMGSAESLFIKAIEDAVALGADVINLSLGTANGAQLSGSKPLMEAIEKAKKAGVSVVVAAGNERVYGSDHDDPLATNPDYGLVGSPSTGRTPTSVAAINSKWVIQRLMTVKELENRADLNHGKAIYSESVDFKDIKDSLGYDKSHQFAYVKESTDAGYNAQDVKGKIALIERDPNKTYDEMIALAKKHGALGVLIFNNKPGQSNRSMRLTANGMGIPSAFISHEFGKAMSQLNGNGTGSLEFDSVVSKAPSQKGNEMNHFSNWGLTSDGYLKPDITAPGGDIYSTYNDNHYGSQTGTSMASPQIAGASLLVKQYLEKTQPNLPKEKIADIVKNLLMSNAQIHVNPETKTTTSPRQQGAGLLNIDGAVTSGLYVTGKDNYGSISLGNITDTMTFDVTVHNLSNKAKTLRYDTELLTDHVDPQKGRFTLTSRSLKTYQGGEVTVPANGKVTVRVTMDVSQFTKELTKQMPNGYYLEGFVRFRDSQDDQLNRVNIPFVGFKGQFENLAVAEESIYRLKSQGKTGFYFDESGPKDDIYVGKHFTGLVTLGSETNVSTKTISDNGLHTLGTFKNADGKFILEKNAQGNPVLAISPNGDNNQDFAAFKGVFLRKYQGLKASVYHASDKEHKNPLWVSPESFKGDKNFNSDIRFAKSTTLLGTAFSGKSLTGAELPDGYYHYVVSYYPDVVGAKRQEMTFDMILDRQKPVLSQATFDPETNRFKPEPLKDRGLAGVRKDSVFYLERKDNKPYTVTINDSYKYVSVEDNKTFVERQADGSFILPLDKAKLGDFYYMVEDFAGNVAIAKLGDHLPQTLGKTPIKLKLTDGNYQTKETLKDNLEMTQSDTGLVTNQAQLAVVHRNQPQSQLTKMNQDFFISPNEDGNKDFVAFKGLKNNVYNDLTVNVYAKDDHQKQTPIWSSQAGASASAIESTAWYGITARGSKVMPGDYQYVVTYRDEHGKEHQKQYTISVNDKKPMITQGRFDTINGVDHFTPDKTKALGSSGIVREEVFYLAKKNGRKFDVTEGKDGITVSDNKVYIPKNPDGSYTISKRDGVTLSDYYYLVEDRAGNVSFATLRDLKAVGKDKAVVNFGLDLPVPEDKQIVNFTYLVRDADGKPIENLEYYNNSGNSLILPYGKYTVELLTYDTNAAKLESDKIVSFTLSADNNFQQVTFKMTMLATSQITAHFDHLLPEGSRVSLKTAQGQLIPLEQSLYVPKAYGKTVQEGTYEVVVSLPKGYRIEGNTKVNTLPNEVHELSLRLVKVGDASDSTGDHKVMSKNNSQALTAFATPTKTTTSATAKALPSAGEKMGLKLRIVGLVLLGLTCVFSRKKSTKD

SEQ ID NO: 30 - protein, 1645 aa, Streptococcus pyogenes; identical to SEQ ID NO: 25

SEQ ID NO: 31 - protein, 1648 aa, Streptococcus pyogenes
VEKKQRFSLRKYKSGTFSVLIGSVFLMMMTTTVAADELTTTSEPTITNHAQQQAQHLTNTELSSAESKPQDTSQITPKTNREKEQSQDLVSEPTTTELADTDAASMANTGPDATQKSASLPPVNTDVHDWVKTKGAWDKGYKGQGKVVAVIDTGIDPAHQSMRISDVSTAKVKSKEDMLARQKAAGINYGSWINDKVVFAHNYVENSDNIKENQFEDFDEDWENFEFDAEAEPKAIKKHKIYRPQSTQAPKETVIKTEETDGSHDIDWTQTDDDTKYESHGMHVTGIVAGNSKEAAATGERFLGIAPEAQVMFMRVFANDVMGSAESLFIKAIEDAVALGADVINLSLGTANGAQLSGSKPLMEAIEKAKKAGVSVVVAAGNERVYGSDHDDPLATNPDYGLVGSPSTGRTPTSVAAINSKWVIQRLMTVKELENRADLNHGKAIYSESVDFKNIKDSLGYDKSHQFAYVKESTDAGYNAQDVKGKIALIERDPNKTYDEMIALAKKHGALGVLIFNNKPGQSNRSMRLTSNGMGIPSAFISHEFGKAMSQLNGNGTGSLEFDSVVSKAPSQKGNEMNHFSNWGLTSDGYLKPDITAPGGDIYSTYNDNHYGSQTGTSMASPQIAGASLLVKQYLEKTQPNLPKEKIADIVKNLLMSNAQIHVNPETKTTTSPRQQGAGLLNIDGAVTSGLYVTGKDNYGSISLGNITDTMTFDVTVHNLSNKAKTLRYDTELLTDHVDPQKGRFTLTSRSLKTYQGGEVTVPANGKVTVRVTMDVSQFTKELTKQMPNGYYLEGFVRFRDSQDDQLNRVNIPFVGFKGQFENLAVAEESIYRLKSQGKTGFYFDESGPKDDIYVGKHFTGLVTLGSETNVSTKTISDNGLHTLGTFKNADGKFILEKNAQGNPVLAISPNGDNNQDFAAFKGVFLRKYQGLKASVYHASDKEHKNPLWVSPESFKGDKNFNSDIRFAKSTTLLGTAFSGKSLTGAELPDGYYHYVVSYYPDVVGAKRQEMTFDMILDRQKPVLSQATFDPETNRFKPEPLKDRGLAGVRKDSVFYLERKDNKPYTVTINDSYKYVSVEDNKTFVERQADGSFILPLDKAKLGDFYYMVEDFAGNVAIAKLGDHLPQTLGKTPIKLKLTDGNYQTKETLKDNLEMTQSDTGLVTNQAQLAVVHRNQPQSQLTKMNQDFFISPNEDGNKDFVAFKGLKNNVYNDLTVNVYAKDDHQKQTPIWSSQAGASASAIESTAWYGITARGSKVMPGDYQYVVTYRDEHGKEHQKQYTISVNDKKPMITQGRFDTINGVDHFTPDKTKALGSSGIVREEVFYLAKKNGRKFDVTEGKDGITVSDNKVYIPKNPDGSYTISKRDGVTLSDYYYLVEDRAGNVSFATLRDLKAVGKDKAVVNFGLDLPVPEDKQIVNFTYLVRDADGKPIENLEYYNNSGNSLILPYGKYTVELLTYDTNAAKLESDKIVSFTLSADNNFQQITFKMTMLATSQITAHFDHLLPEGSRVSLKTAQGQLIPLEQSLYVPKAYGKTVQEGTYEVVVSLPKGYRIEGNTKVNTLPNEVHELSLRLVKVGDASDSTGDHKVMSKNNSQALTASATPTKTTTSATAKALPSAGEKMGLKLRIVGLVLLGLTCVFSRKKSTKD

SEQ ID NO: 32 - protein, 1649 aa, Streptococcus pyogenes
VEKKQRFSLRKYKSGTFSVLIGSVFLMMMMTTTVAADELTTTSEPTITNHAQQQAQHLTNTELSSAESKPQDTSQITPKTNREKEQSQDLVSEPTTTELADTDAASMANTGPDATQKSASLPPVNTDVHDWVKTKGAWGKGYKGQGKVVAVIDTGIDPAHQSMRISDVSTAKVKSKEDMLARQKAAGINYGSWINDKVVFAHNYVENSDNIKENQFEDFDEDWENFEFDADAEPKAIKKHKIYRPQSTQAPKETVIKTEETDGSHDIDWTQTDDDTKYESHGMHVTGIVAGNSKEAAATGERFLGIAPEAQVMFMRVFANDVMGSAESLFIKAIEDAVALGADVINLSLGTANGAQLSGSKPLMEAIEKAKKAGVSVVVAAGNERVYGSDHDDPLATNPDYGLVGSPSTGRTPTSVAAINSKWVIQRLMTVKELENRADLNHGKAIYSESVDFKNIKDSLGYDKSHQFAYVKESTDAGYNAQDVKGKIALIERDPNKTYDEMIALAKKHGALGVLIFNNKPGQSNRSMRLTANGMGIPSAFISHEFGKAMSQLNGNGTGSLEFDSVVSKAPSQKGNEMNHFSNWGLTSDGYLKPDITAPGGDIYSTYNDNHYGSQTGTSMASPQIAGASLLVKQYLEKTQPNLPKEKIADIVKNLLMSNAQIHVNPETKTTTSPRQQGAGLLNIDGAVTSGLYVTGKDNYGSISLGNITDTMTFDVTVHNLSNKDKTLRYDTELLTDHVDPQKGRFTLTSRSLKTYQGGEVTVPANGKVTVRVTMDVSQFTKELTKQMPNGYYLEGFVRFRDSQDDQLNRVNIPFVGFKGQFENLAVAEESIYRLKSQGKTGFYFDESGPKDDIYVGKHFTGLVTLGSETNVSTKTISDNGLHTLGTFKNADGKFILEKNAQGNPVLAISPNGDNNQDFAAFKGVFLRKYQGLKASVYHASDKEHKNPLWVSPESFKGDKNFNSDIRFAKSTTLLGTAFSGKSLTGAELPDGYYHYVVSYYPDVVGAKRQEMTFDMILDRQKPVLSQATFDPETNRFKPEPLKDRGLAGVRKDSVFYLERKDNKPYTVTINDSYKYVSVEDNKTFVERQADGSFILPLDKAKLGDFYYMVEDFAGNVAIAKLGDHLPQTLGKTPIKLKLTDGNYQTKETLKDNLEMTQSDTGLVTNQAQLAVVHRNQPQSQLTKMNQDFFISPNEDGNKDFVAFKGLKNNVYNDLTVNVYAKDDHQKQTPIWSSQAGASASAIESTAWYGITARGSKVMPGDYQYVVTYRDEHGKVHQKQYTISVNDKKPMITQGRFDTINGVDHFTPDKTKALGSSGIVREEVFYLAKKNGRKFDVTEGKDGITVSDNKVYIPKNPDGSYTISKRDGVTLSDYYYLVEDRAGNVSFATLRDLKAVGKDKAVVNFGLDLPVPEDKQIVNFTYLVRDADGKPIENLEYYNNSGNSLILPYGKYTVELLTYDTNAAKLESDKIVSFTLSADNNFQQVTFKMTMLATSQITAHFDHLLPEGSRVSLKTAQGQLIPLEQSLYVPKAYGKTVQEGTYEVVVSLPKGYRIEGNTKVNTLPNEVHELSLRLVKVGDASDSTGDHKVMSKNNSQALTASATPTKTTTSATAKALPSTGEKMGLKLRIVGLVLLGLTCVFSRKKSTKD

SEQ ID NO: 33 - protein, 1649 aa, Streptococcus pyogenes
VEKKQRFSLRKYKSGTFSVLIGSVFLMMMMTTTVAADELTTTSEPTITNHAQQQAQHLTNTELSSAESKPQDTSQITPKTNREKEQSQDLVSEPTTTELADTDAASMANTGPDATQKSASLPPVNTDVHDWVKTKGAWGKGYKGQGKVVAVIDTGIDPAHQSMRISDVSTAKVKSKEDMLARQKAAGINYGSWINDKVVFAHNYVENSDNIKENQFEDFDEDWENFEFDADAEPKAIKKHKIYRPQSTQAPKETVIKTEETDGSHDIDWTQTDDDTKYESHGMHVTGIVAGNSKEAAATGERFLGIAPEAQVMFMRVFANDVMGSAESLFIKAIEDAVALGADVINLSLGTANGAQLSGSKPLMEAIEKAKKAGVSVVVAAGNERVYGSDHDDPLATNPDYGLVGSPSTGRTPTSVAAINSKWVIQRLMTVKELENRADLNHGKAIYSESVDFKNIKDSLGYDKSHQFAYVKESTDAGYNAQDVKGKIALIERDPNKTYDEMIALAKKHGALGVLIFNNKPGQSNRSMRLTANGMGIPSAFISHEFGKAMSQLNGNGTGSLEFDSVVSKAPSQKGNEMNHFSNWGLTSDGYLKPDITAPGGDIYSTYNDNHYGSQTGTSMASPQIAGASLLVKQYLEKTQPNLPKEKIADIVKNLLMSNAQIHVNPETKTTTSPRQQGAGLLNIDGAVTSGLYVTGKDNYGSISLGNITDTMTFDVTVHNLSNKDKTLRYDTELLTDHVDPQKGRFTLTSRSLKTYQGGEVTVPANGKVTVRVTMDVSQFTKELTKQMPNGYYLEGFVRFRDSQDDQLNRVNIPFVGFKGQFENLAVAEESIYRLKSQGKTGFYFDESGPKDDIYVGKHFTGLVTLGSETNVSTKTISDNGLHTLGTFKNADGKFILEKNAQGNPVLAISPNGDNNQDFAAFKGVFLRKYQGLKASVYHASDKEHKNPLWVSPESFKGDKNFNSDIRFAKSTTLLGTAFSGKSLTGAELPDGYYHYVVSYYPDVVGAKRQEMTFDMILDRQKPVLSQATFDPETNRFKPEPLKDRGLAGVRKDSVFYLKRKDNKPYTVTINDSYKYVSVEDNKTFVERQADGSFILPLDKAKLGDFYYMVEDFAGNVAIAKLGDHLPQTLGKTPIKLKLTDGNYQTKETLKDNLEMTQSDTGLVTNQAQLAVVHRNQPQSQLTKMNQDFFISPNEDGNKDFVAFKGLKNNVYNDLTVNVYAKDDHQKQTPIWSSQAGASASAIESTAWYGITARGSKVMPGDYQYVVTYRDEHGKVHQKQYTISVNDKKPMITQGRFDTINGVDHFTPDKTKALGSSGIVREEVFYLAKKNGRKFDVTEGKDGITVSDNKVYIPKNPDGSYTISKRDGVTLSDYYYLVEDRAGNVSFATLRDLKAVGKDKAVVNFGLDLPVPEDKQIVNFTYLVRDADGKPIENLEYYNNSGNSLILPYGKYTVELLTYDTNAAKLESDKIVSFTLSADNNFQQVTFKMTMLATSQITAHFDHLLPEGSRVSLKTAQGQLIPLEQSLYVPKAYGKTVQEGTYEVVVSLPKGYRIEGNTKVNTLPNEVHELSLRLVKVGDASDSTGDHKVMSKNNSQALTASATPTKTTTSATAKALPSTGEKMGLKLRIVGLVLLGLTCVFSRKKSTKD

SEQ ID NO: 34 - protein, 1649 aa, Streptococcus pyogenes
VEKKQRFSLRKYKSGTFSVLIGSVFLMMMMTTTVAADELTTTSEPTITNHAQQQAQHLTNTELSSAESKPQDTSQITPKTNREKEQSQDLVFEPTTTELADTDAASMANTGPDATQKSASLPPVNTDVHDWVKTKGAWGKGYKGQGKVVAVIDTGIDPAHQSMRISDVSTAKVKSKEDMLARQKAAGINYGSWINDKVVFAHNYVENSDNIKENQFEDFDEDWENFEFDADAEPKAIKKHKIYRPQSTQAPKETVIKTEETDGSHDIDWTQTDDDTKYESHGMHVTGIVAGNSKEAAATGERFLGIAPEAQVMFMRVFANDVMGSAESLFIKAIEDAVALGADVINLSLGTANGAQLSGSKPLMEAIEKAKKAGVSVVVAAGNERVYGSDHDDPLATNPDYGLVGSPSTGRTPTSVAAINSKWVIQRLMTVKELENRADLNHGKAIYSESVDFKNIKDSLGYDKSHQFAYVKESTDAGYNAQDVKGKIALIERDPNKTYDEMIALAKKHGALGVLIFNNKPGQSNRSMRLTANGMGIPSAFISHEFGKAMSQLNGNGTGSLEFDSVVSKAPSQKGNEMNHFSNWGLTSDGYLKPDITAPGGDIYSTYNDNHYGSQTGTSMASPQIAGASLLVKQYLEKTQPNLPKEKIADIVKNLLMSNAQIHVNPETKTTTSPRQQGAGLLNIDGAVTSGLYVTGKDNYGSISLGNITDTMTFDVTVHNLSNKDKTLRYDTELLTDHVDPQKGRFTLTSRSLKTYQGGEVTVPANGKVTVRVTMDVSQFTKELTKQMPNGYYLEGFVRFRDSQDDQLNRVNIPFVGFKGQFENLAVAEESIYRLKSQGKTGFYFDESGPKDDIYVGKHFTGLVTLGSETNVSTKTISDNGLHTLGTFKNADGKFILEKNAQGNPVLAISPNGDNNQDFAAFKGVFLRKYQGLKASVYHASDKEHKNPLWVSPESFKGDKNFNSDIRFAKSTTLLGTAFSGKSLTGAELPDGYYHYVVSYYPDVVGAKRQEMTFDMILDRQKPVLSQATFDPETNRFKPEPLKDRGLAGVRKDSVFYLERKDNKPYTVTINDSYKYVSVEDNKTFVERQADGSFILPLDKAKLGDFYYMVEDFAGNVAIAKLGDHLPQTLGKTPIKLKLTDGNYQTKETLKDNLEMTQSDTGLVTNQAQLAVVHRNQPQSQLTKMNQDFFISPNEDGNKDFVAFKGLKNNVYNDLTVNVYAKDDHQKQTPIWSSQAGASASAIESTAWYGITARGSKVMPGDYQYVVTYRDEHGKVHQKQYTISVNDKKPMITQGRFDTINGVDHFTPDKTKALGSSGIVREEVFYLAKKNGRKFDVTEGKDGITVSDNKVYIPKNPDGSYTISKRDGVTLSDYYYLVEDRAGNVSFATLRDLKAVGKDKAVVNFGLDLPVPEDKQIVNFTYLVRDADGKPIENLEYYNNSGNSLILPYGKYTVELLTYDTNAAKLESDKIVSFTLSADNNFQQVTFKMTMLATSQITAHFDHLLPEGSRVSLKTAQGQLIPLEQSLYVPKAYGKTVQEGTYEVVVSLPKGYRIEGNTKVNTLPNEVHELSLRLVKVGDASDSTGDHKVMSKNNSQALTASATPTKTTTSATAKALPSTGEKMGLKLRIVGLVLLGLTCVFSRKKSTKD

SEQ ID NO: 35 - protein, 1649 aa, Streptococcus pyogenes
VEKKQRFSLRKYKSGTFSVLIGSVFLMMMMTTTVAADELTTTSEPTITNHAQQQAQHLTNTELSSAESKPQDTSQITPKTNREKEQSQDLVSEPTTTELADTDAASMANTGPDATQKSASLPPVNTDVHDWVKTKGAWGKGYKGQGKVVAVIDTGIDPAHQSMRISDVSTAKVKSKEDMLARQKAAGINYGSWINDKVVFAHNYVENSDNIKENQFEDFDEDWENFEFDADAEPKAIKKHKIYRPQSTQAPKETVIKTEETDGSHDIDWTQTDDDTKYESHGMHVTGIVAGNSKEAAATGERFLGIAPEAQVMFMRVFANDVMGSAESLFIKAIEDAVALGADVINLSLGTANGAQLSGSKPLMEAIEKAKKAGVSVVVAAGNERVYGSDHDDPLATNPDYGLVGSPSTGRTPTSVAAINSKWVIQRLMTVKELENRADLNHGKAIYSESVDFKNIKDSLGYDKSHQFAYVKESTDAGYNAQDVKGKIALIERDPNKTYDEMIALAKKHGALGVLIFNNKPGQSNRSMRLTANGMGIPSAFISHEFGKAMSQLNGNGTGSLEFDSVVSKAPSQKGNEMNHFSNWGLTSDGYLKPDITAPGGDIYSTYNDNHYGSQTGTSMASPQIAGASLLVKQYLEKTQPNLPKEKIADIVKNLLMSNAQIHVNPETKTTTSPRQQGAGLLNIDGAVTSGLYVTGKDNYGSISLGNITDTMTFDVTVHNLSNKDKTLRYDTELLTDHVDPQKGRFTLTSRSLKTYQGGEVTVPANGKVTVRVTMDVSQFTKELTKQMPNGYYLEGFVRFRDSQDDQLNRVNIPFVGFKGQFENLAVAEESIYRLKSQGKTGFYFDESGPKDDIYVGKHFTGLVTLGSETNVSTKTISDNGLHTLGTFKNADGKFILEKNAQGNPVLAISPNGDNNQDFAAFKGVFLRKYQGLKASVYHASDKEHKNPLWVSPESFKGDKNFNSDIRFAKSTTLLGTAFSGKSLTGAELPDGYYHYVVSYYPDVVGAKRQEMTFDMILDRQKPVLSQATFDPETNRFKPEPLKDRGLAGVRKDSVFYLERKDNKPYTVTINDSYKYVSVEDNKTFVERQADGSFILPLDKAKLGDFYYMVEDFAGNVAIAKLGDHLPQTLGKTPIKLKLTDGNYQTKETLKDNLEMTQSDTGLVTNQAQLAVVHRNQPQSQLTKMNQDFFISPNEDGNKDFVAFKGLKNNVYNDLTVNVYAKDDHQKQTPIWSSQAGASASAIESTAWYGITARGSKVMPGDYQYVVTYRDEHGKVHQKQYTISVNDKKPMITQGRFDTINGVDHFTPDKTKALGSSGIVREEVFYLAKKNGRKFDVTEGKDGITVSDNKVYIPKNPDGSYTISKRDGVTLSDYYYLVEDRAGNVSFATLRDLKAVGKDKAVVNFGLDLPVPEDKQIVNFTYLVRDADGKPIENLEYYNNSGNSLILPYGKYTVELLTYDTNAAKLESDKIVSFTLSADNNFQQVTFKMTMLATSQITAHFDHLLPEGSRVSLKTAQGQLIPLEQSLYVPKAYGKTVQEGTYEVVVSLPKGYRIEGNTKVNTLPNEVHELSLRLVKVGDASDSTGDHKVMSKNNSQALTASATPTKTTTSATAKALPSTGEKMGLKLRIVGLVLLGLTCVFSRKKSTKE

SEQ ID NO: 36 - protein, 1648 aa, Streptococcus pyogenes
VEKKQRFSLRKYKSGTFSVLIGSVFLMMMTTTVAADELTTTSEPTITNHTQQQAQHLTNTELSSAESKPQDTSQITLKTNREKEQPQGLVSEPTTTELADTDAAPMANTGPDATQKSASLPPVNTDVHDWVKTKGAWDKGYKGQGKVVAVIDTGIDPAHQSMRISDVSTAKVKSKEDMLARQKAAGINYGSWINDKVVFAHNYVENSDNIKENQFEDFDEDWENFEFDAEAEPKAIKKHKIYRPQSTQAPKETVIKTEETDGSHDIDWTQTDDDTKYESHGMHVTGIVAGNSKEAAATGERFLGIAPEAQVMFMRVFANDVMGSAESLFIKAIEDAVALGADVINLSLGTANGAQLSGSKPLMEAIEKAKKAGVSVVVAAGNERVYGSDHDDPLATNPDYGLVGSPSTGRTPTSVAAINSKWVIQRLMTVKELENRADLNHGKAIYSESVDFKNIKDSLGYDKTHQFAYVKESTDAGYKAQDVKGKIALIERDPNKTYDEMIALAKKHGALGVLIFNNKPGQSNRSMRLTANGMGIPSAFISHEFGKAMSQLNGNGTGSLEFDSVVSKAPSQKGNEMNHFSNWGLTSDGYLKPDITAPGGDIYSTYNDNHYGSQTGTSMASPQIAGASLLVKQYLEKTQPNLPKEKIADIVKNLLMSNAQIHVNPETKTTTSPRQQGAGLLNIDGAVTSGLYVTGKDNYGSISLGNITDTMTFDVTVHNLSNKDKTLRYDTELLTDHVDPQKGRFTLTSRSLKTYQGGEVTVPANGKVTVRVTMDVSQFTKELTKQMPNGYYLEGFVRFRDSQDAQLNRVNIPFVGFKGQFENLAVAEESIYRLKSQGKTGFYFDESGPKDDIYVGKHFTGLVTLGSETNVSTKTISDNGLHTLGTFKNADGKFILEKNAQGNPVLAISPNGDNNQDFAAFKGVFLRKYQGLKASVYHASDKEHKNPLWVSPESFKGDKNFNSDIRFAKSTTLLGTAFSGKSLTGAELPDGHYHYVVSYYPDVVGAKRQEMTFDMILDRQKPVLSQATFDPETNRFKPEPLKDRGLAGVRKDSVFYLERKDNKPYTVTINDSYKYVSVEDNKTFVERQADGSFILPLDKAKLGDFYYMVEDFAGNVAIAKLGDHLPQTLGKTPIKLKLTDGNYQTKETLKDNLEMTQSDTGLVTNQAQLAVVHRNQPQSQLTKMNQDFFISPNEDGNKDFVAFKGLKNNVYNDLTVNVYAKDDHQKQTPIWSSQAGASASAIESTAWYGITARGSKVMPGDYQYVVTYRDEHGKEHQKQYTISVNDKKPMITQGRFDTINGVDHFTPDKTKALGSSGIVREEVFYLAKKNGRKFDVTEGKDGITVSDNKVYIPKNPDGSYTISKRDGVTLSDYYYLVEDRAGNVSFATLRDLKAVGKDKAVVNFGLDLPVPEDKQIVNFTYLVRDADGKPIENLEYYNNSGNSLILPYGKYTVELLTYDTNAAKLESDKIVSFTLSADNNFQQVTFKMTMLATSQITAHFDHLLPEGSRVSLKTAQGQLIPLEQSLYVPKAYGKTVQEGTYEVVVSLPKGYRIEGNTKVNTLPNEVHELSLRLVKVGDASDSTGDHKVMSKNNSQALTASATPTKTTTSATAKALPSTGEKMGLKLRIVGLVLLGLTCVFSRKKSTKD

SEQ ID NO: 37 - protein, 1648 aa, Streptococcus pyogenes
VEKKQRFSLRKYKSGTFSVLIGSVFLMMMTTTVAADELTTTSEPTITNHTQQQAQHLTNTELSSAESKPQDTSQITLKTNREKEQPQGLVSEPTTTELADTDAAPMANTGPDATQKSASLPPVNTDVHDWVKTKGAWDKGYKGQGKVVAVIDTGIDPAHQSMRISDVSTAKVKSKEDMLARQKAAGINYGSWINDKVVFAHNYVENSDNIKENQFEDFDEDWENFEFDAEAEPKAIKKHKIYRPQSTQAPKETVIKTEETDGSHDIDWTQTDDDTKYESHGMHVTGIVAGNSKEAAATGERFLGIAPEAQVMFMRVFANDVMGSAESLFIKAIEDAVALGADVINLSLGTANGAQLSGSKPLMEAIEKAKKAGVSVVVAAGNERVYGSDHDDPLATNPDYGLVGSPSTGRTPTSVAAINSKWVIQRLMTVKELENRADLNHGKAIYSESVDFKNIKDSLGYDKTHQFAYVKESTDAGYKAQDVKGKIALIERDPNKTYDEMIALAKKHGALGVLIFNNKPGQSNRSMRLTANGMGIPSAFISHEFGKAMSQLNGNGTGSLEFDSVVSKAPSQKGNEMNHFSNWGLTSDGYLKPDITAPGGDIYSTYNDNHYGSQTGTSMASPQIAGASLLVKQYLEKTQPNLPKEKIADIVKNLLMSNAQIHVNPETKTTTSPRQQGAGLLNIDGAVTSGLYVTGKDNYGSISLGNITDTMTFDVTVHNLSNKDKTLRYDTELLTDHVDPQKGRFTLTSRSLKTYQGGEVTVPANGKVTVRVTMDVSQFTKELTKQMPNGYYLEGFVRFRDSQDDQLNRVNIPFVGFKGQFENLAVAEESIYRLKSQGKTGFYFDESGPKDDIYVGKHFTGLVTLGSETNVSTKTISDNGLHTLGTFKNADGKFILEKNAQGNPVLAISPNGDNNQDFAAFKGVFLRKYQGLKASVYHASDKEHKNPLWVSPESFKGDKNFNSDIRFAKSTTLLGTAFSGKSLTGAELPDGHYHYVVSYYPDVVGAKRQEMTFDMILDRQKPVLSQATFDPETNRFKPEPLKDRGLAGVRKDSVFYLERKDNKPYTVTINDSYKYVSVEDNKTFVERQADGSFILPLDKAKLGDFYYMVEDFAGNVAIAKLGDHLPQTLGKTPIKLKLTDGNYQTKETLKDNLEMTQSDTGLVTNQAQLAVVHRNQPQSQLTKMNQDFFISPNEDGNKDFVAFKGLKNNVYNDLTVNVYAKDDHQKQTPIWSSQAGASASAIESTAWYGITARGSKVMPGDYQYVVTYRDEHGKEHQKQYTISVNDKKPMITQGRFDTINGVDHFTPDKTKALGSSGIVREEVFYLAKKNGRKFDVTEGKDGITVSDNKVYIPKNPDGSYTISKRDGVTLSDYYYLVEDRAGNVSFATLRDLKAVGKDKAVVNFGLDLPVPEDKQIVNFTYLVRDADGKPIENLEYYNNSGNSLILPYGKYTVELLTYDTNAAKLESDKIVSFTLSADNNFQQVTFKMTMLATSQITAHFDHLLPEGSRVSLKTAQGQLIPLEQSLYVPKAYGKTVQEGTYEVVVSLPKGYRIEGNTKVNTLPNEVHELSLRLVKVGDASDSTGDHKVMSKNNSQALTASATPTKTTTSATAKALPSTGEKMGLKLRIVGLVLLGLTCVFSRKKSTKD

SEQ ID NO: 38 - protein, 1648 aa, Streptococcus pyogenes
VEKKQRFSLRKYKSGTFSVLIGSVFLMMMTTTVAADELTTTSEPTITNHTQQQAQHLTNTELSSAESKPQDTSQITLKTNREKEQPQGLVSEPTTTELADTDAAPMANTGPDATQKSASLPPVNTDVHDWVKTKGAWDKGYKGQGKVVAVIDTGIDPAHQSMRISDVSTAKVKSKEDMLARQKAAGINYGSWINDKVVFAHNYVENSDNIKENQFEDFDEDWENFEFDAEAEPKAIKKHKIYRPQSTQAPKETVIKTEETDGSHDIDWTQTDDDTKYESHGMHVTGIVAGNSKEAAATGERFLGIAPEAQVMFMRVFANDVMGSAESLFIKAIEDAVALGADVINLSLGTANGAQLSGSKPLMEAIEKAKKAGVSVVVAAGNERVYGSDHDDPLATNPDYGLVGSPSTGRTPTSVAAINSKWVIQRLMTVKELENRADLNHGKAIYSESVDFKNIKDSLGYDKSHQFAYVKESTDAGYNAQDVKGKIALIERDPNKTYDEMIALAKKHGALGVLIFNNKPGQSNRSMRLTANGMGIPSAFISHEFGKVMSQLNGNGTGSLEFDSVVSKAPSQKGNEMNHFSNWGLTSDGYLKPDITAPGGDIYSTYNDNHYGSQTGTSMASPQIAGASLLVKQYLEKTQPNLPKEKIADIVKNLLMSNAQIHVNPETKTTTSPRQQGAGLLNIDGAVTSGLYVTGKDNYGSISLGNITDTMTFDVTVHNLSNKAKTLRYDTELLTDHVDPQKGRFTLTSRSLKTYQGGEVTVPANGKVTVRVTMDVSQFTKELTKQMPNGYYLEGFVRFRDSQDDQLNRVNIPFVGFKGQFENLAVAEESIYRLKSQGKTGFYFDESGPKDDIYVGKHFTGLVTLGSETNVSTKMISDNGLHTLGTFKNADGKFILEKNAQGNPVLAISPNGDNNQDFAAFKGVFLRKYQGLKASVYHASDKEHKNPLWVSPESFKGDKNFNSDIRFAKSTTLLGTAFSGKSLTGAELPDGYYHYVVSYYPDVVGAKRQEMTFDMILDRQKPVLSQATFDPETNRFKPEPLKDRGLAGVRKDSVFYLERKDNKPYTVTINDSYKYVSVEDSKTFVERQADGSFILPLDKAKLGDFYYMVEDFAGNVAIAKLGDHLPQTLGKTPIKLKLTDGNYQTKETLKDNLEMTQSDTGLVTNQAQLAVVHRNQPQSQLTKMNQDFFISPNEDGNKDFVAFKGLKNNVYNDLTVNVYAKDDHQKQTPIWSSQAGASASAIESTAWYGITARGSKVMPGDYQYVVTYRDEHGKEHQKQYTISVNDKKPMITQGRFDTINGVDHFTPDKTKALGSSGIVREEVFYLAKKNGRKFDVTEGKDGITVSDNKVYIPKNPDGSYTISKRDGVTLSDYYYLVEDRAGNVSFATLRDLKVVGKDKAVVNFGLDLPVPEDKQIVNFTYLVRDADGKPIENLEYYNNSGNSLILPYGKYTVELLTYDTNAAKLESDKIVSFTLSADNNFQQVTFKMTMLATSQITAHFDHLLPEGSRVSLKTAQGQLIPLEQSLYVPKAYGKTVQEGTYEVVVSLPKGYRIEGDTKVNALPNEVHELSLRLVKVGDASDSTGDHKVMSKNNSQALTASATPTKTTTSATAKALPSAGEKMGLKLRIVGLVLLGLTCVFSRKKSTKD

SEQ ID NO: 39 - protein, 1648 aa, Streptococcus pyogenes; identical to SEQ ID NO: 38

SEQ ID NO: 40 - protein, 1648 aa, Streptococcus pyogenes; identical to SEQ ID NO: 38

SEQ ID NO: 41 - protein, 1648 aa, Streptococcus pyogenes; identical to SEQ ID NO: 38

SEQ ID NO: 42 - protein, 1648 aa, Streptococcus pyogenes; identical to SEQ ID NO: 38

SEQ ID NO: 43 - protein, 1648 aa, Streptococcus pyogenes
VEKKQRFSLRKYKSGTFSVLIGSVFLMMMTTTVAADELTTTSEPTITNHTQQQAQHLTNTELSSAESKPQDTSQITLKTNREKEQPQGLVSEPTTTELADTDAAPMANTGPDATQKSASLPPVNTDVHDWVKTKGAWDKGYKGQGKVVAVIDTGIDPAHQSMRISDVSTAKVKSKEDMLARQKAAGINYGSWINDKVVFAHNYVENSDNIKENQFEDFDEDWENFEFDAEAEPKAIKKHKIYRPQSTQAPKETVIKTEETDGSHDIDWTQTDDDTKYESHGMHVTGIVAGNSKEAAATGERFLGIAPEAQVMFMRVFANDVMGSAESLFIKAIEDAVALGADVINLSLGTANGAQLSGSKPLMEAIEKAKKAGVSVVVAAGNERVYGSDHDDPLATNPDYGLVGSPSTGRTPTSVAAINSKWVIQRLMTVKELENRADLNHGKAIYSESVDFKNIKDSLGYDKSHQFAYVKESTDAGYNAQDVKGKIALIERDPNKTYDEMIALAKKHGALGVLIFNNKPGQSNRSMRLTANGMGIPSAFISHEFGKAMSQLNGNGTGSLEFDSVVSKAPSQKGNEMNHFSNWGLTSDGYLKPDITAPGGDIYSTYNDNHYGSQTGTSMASPQIAGASLLVKQYLEKTQPNLPKEKIADIVKNLLMSNAQIHVNPETKTTTSPRQQGAGLLNIDGAVTSGLYVTGKDNYGSISLGNITDTMTFDVTVHNLSNKAKTLRYDTELLTDHVDPQKGRFTLTSRSLKTYQGGEVTVPANGKVTVRVTMDVSQFTKELTKQMPNGYYLEGFVRFRDSQDDQLNRVNIPFVGFKGQFENLAVAEESIYRLKSQGKTGFYFDESGPKDDIYVGKHFTGLVTLGSETNVSTKMISDNGLHTLGTFKNADGKFILEKNAQGNPVLAISPNGDNNQDFAAFKGVFLRKYQGLKASVYHASDKEHKNPLWVSPESFKGDKNFNSDIRFAKSTTLLGTAFSGKSLTGAELPDGYYHYVVSYYPDVVGAKRQEMTFDMILDRQKPVLSQATFDPETNRFKPEPLKDRGLAGVRKDSVFYLERKDNKPYTVTINDSYKYVSVEDSKTFVERQADGSFILPLDKAKLGDFYYMVEDFAGNVAIAKLGDHLPQTLGKTPIKLKLTDGNYQTKETLKDNLEMTQSDTGLVTNQAQLAVVHRNQPQSQLTKMNQDFFISPNEDGNKDFVAFKGLKNNVYNDLTVNVYAKDDHQKQTPIWSSQAGASASAIESTAWYGITARGSKVMPGDYQYVVTYRDEHGKEHQKQYTISVNDKKPMITQGRFDTINGVDHFTPDKTKALGSSGIVREEVFYLAKKNGRKFDVTEGKDGITVSDNKVYIPKNPDGSYTISKRDGVTLSDYYYLVEDRAGNVSFATLRDLKVVGKDKAVVNFGLDLPVPEDKQIVNFTYLVRDADGKPIENLEYYNNSGNSLILPYGKYTVELLTYDTNAAKLESDKIVSFTLSADNNFQQVTFKMTMLATSQITAHFDHLLPEGSRVSLKTAQGQLIPLEQSLYVPKAYGKTVQEGTYEVVVSLPKGYRIEGDTKVNALPNEVHELSLRLVKVGDASDSTGDHKVMSKNNSQALTASATPTKTTTSATAKALPSAGEKMGLKLRIVGLVLLGLTCVFSRKKSTKD

SEQ ID NO: 44 - protein, 1647 aa, Streptococcus pyogenes
VEKKQRFSLRKYKSGTFSVLIGSVFLMMTTTVAADELTTTSEPTITNHTQQQAQHLTNTELSSAESKPQDTSQITLKTNREKEQPQGLVSEPTTTELADTDAAPMANTGPDATQKSASLPPVNTDVHDWVKTKGAWDKGYKGQGKVVAVIDTGIDPAHQSMRISDVSTAKVKSKEDMLARQKAAGINYGSWINDKVVFAHNYVENSDNIKENQFEDFDEDWENFEFDAEAEPKAIKKHKIYRPQSTQAPKETVIKTEETDGSHDIDWTQTDDDTKYESHGMHVTGIVAGNSKEAAATGERFLGIAPEAQVMFMRVFANDVMGSAESLFIKAIEDAVALGADVINLSLGTANGAQLSGSKPLMEAIEKAKKAGVSVVVAAGNERVYGSDHDDPLATNPDYGLVGSPSTGRTPTSVAAINSKWVIQRLMTVKELENRADLNHGKAIYSESVDFKNIKDSLGYDKSHQFAYVKESTDAGYNAQNVKGKIALIERDPNKTYDEMIALAKKHGALGVLIFNNKPGQSNRSMRLTANGMGIPSAFISHEFGKAMSQLNGNGTGSLEFDSVVSKAPSQKGNEMNHFSNWGLTSDGYLKPDITAPGGDIYSTYNDNHYGSQTGTSMASPQIAGASLLVKQYLEKTQPNLPKEKIADIVKNLLMSNAQIHVNPETKTTTSPRQQGAGLLNIDGAVTSGLYVTGKDNYGSISLGNITDTMTFDVTVHNLSNKAKTLRYDTELLTDHVDPQKGRFTLTSRSLKTYQGGEVTVPANGKVTVRVTMDVSQFTKELTKQMPNGYYLEGFVRFRDSQDDQLNRVNIPFVGFKGQFENLAVAEESIYRLKSQGKTGFYFDESGPKDDIYVGKHFTGLVTLGSETNVSTKTISDNGLHTLGTFKNADGKFILEKNAQGNPVLAISPNGDNNQDFAAFKGVFLRKYQGLKASVYHASDKEHKNPLWVSPESFKGDKNFNSDIRFAKSTTLLGTAFSGKSLTGAELPDGYYHYVVSYYPDVVGAKRQEMTFDMILDRQKPVLSQATFDPETNRFKPEPLKDRGLAGVRKDSVFYLERKDNKPYTVTINDSYKYVSVEDNKTFVERQADGSFILPLDKAKLGDFYYMVEDFAGNVAIAKLGDHLPQTLGKTPIKLKLTDGNYQTKETLKDNLEMTQSDTGLVTNQAQLAVVHRNQPQSQLTKMNQDFFISPNEDGNKDFVAFKGLKNNVYNDLTVNVYAKDDHQKQTPIWSSQAGASASAIESTAWYGITARGSKVMPGDYQYVVTYRDEHGKEHQKQYTISVNDKKPMITQGRFDTINGVDHFTPDKTKALGSSGIVREEVFYLAKKNGRKFDVTEGKDGITVSDNKVYIPKNPDGSYTISKRDGVTLSDYYYLVEDRAGNVSFATLRDLKAVGKDKAVVNFGLDLPVPEDKQIVNFTYLVRDADGKPIENLEYYNNSGNSLILPYGKYTVELLTYDTNAAKLESDKIVSFTLSADNNFQQVTFKMTMLATSQITAHFDHLLPEGSRVSLKTAQGQLIPLEQSLYVPKAYGKTVQEGTYEVVVSLPKGYRIEGNTKVNTLPNEVHELSLRLVKVGDASDSTGDHKVMSKNNSQALTASATPTKTTTSATAKALPSAGEKMGLKLRIVGLVLLGLTCVFSRKKSTKD

SEQ ID NO: 45 - protein, 1647 aa, Streptococcus pyogenes
VEKKQRFSLRKYKSGTFSVLIGSVFLMMTTTVAADELTTTSEPTITNHTQQQAQHLTNTELSSAESKPQDTSQITLKTNREKEQPQGLVSEPTTTELADTDAAPMANTGPDATQKSASLPPVNTDVHDWVKTKGAWDKGYKGQGKVVAVIDTGIDPAHQSMRISDVSTAKVKSKEDMLARQKAAGINYGSWINDKVVFAHNYVENSDNIKENQFEDFDEDWENFEFDAEAEPKAIKKHKIYRPQSTQAPKETVIKTEETDGSHDIDWTQTDDDTKYESHGMHVTGIVAGNSKEAAATGERFLGIAPEAQVMFMRVFANDVMGSAESLFIKAIEDAVALGADVINLSLGTANGAQLSGSKPLMEAIEKAKKAGVSVVVAAGNERVYGSDHDDPLATNPDYGLVGSPSTGRTPTSVAAINSKWVIQRLMTVKELENRADLNHGKAIYSESVDFKNIKDSLGYDKSHQFAYVKESTDAGYNAQNVKGKIALIERDPNKTYDEMIALAKKHGALGVLIFNNKPGQSNRSMRLTANGMGIPSAFISHEFGKAMSQLNGNGTGSLEFDSVVSKAPSQKGNEMNHFSNWGLTSDGYLKPDITAPGGDIYSTYNDNHYGSQTGTSMASPQIAGASLLVKQYLEKTQPNLPKEKIADIVKNLLMSNAQIHVNPETKTTTSPRQQGAGLLNIDGAVTSGLYVTGKDNYGSISLGNITDTMTFDVTVHNLSNKAKTLRYDTELLTDHVDPQKGRFTLTSRSLKTYQGGEVTVPANGKVTVRVTMDVSQFTKELTKQMPNGYYLEGFVRFRDSQDDQLNRVNIPFVGFKGQFENLAVAEESIYRLKSQGKTGFYFDESGPKDDIYVGKHFTGLVTLGSETNVSTKTISDNGLHTLGTFKNVDGKFILEKNAQGNPVLAISPNGDNNQDFAAFKGVFLRKYQGLKASVYHASDKEHKNPLWVSPESFKGDKNFNSDIRFAKSTTLLGTAFSGKSLTGAELPDGYYHYVVSYYPDVVGAKRQEMTFDMILDRQKPVLSQATFDPETNRFKPEPLKDRGLAGVRKDSVFYLERKDNKPYTVTINDSYKYVSVEDNKTFVERQADGSFILPLDKAKLGDFYYMVEDFAGNVAIAKLGDHLPQTLGKTPIKLKLTDGNYQTKETLKDNLEMTQSDTGLVTNQAQLAVVHRNQPQSQLTKMNQDFFISPNEDGNKDFVAFKGLKNNVYNDLTVNVYAKDDHQKQTPIWSSQAGASASAIESTAWYGITARGSKVMPGDYQYVVTYRDEHGKEHQKQYTISVNDKKPMITQGRFDTINGVDHFTPDKTKALGSSGIVREEVFYLAKKNGRKFDVTEGKDGITVSDNKVYIPKNPDGSYTISKRDGVTLSDYYYLVEDRAGNVSFATLRDLKAVGKDKAVVNFGLDLPVPEDKQIVNFTYLVRDADGKPIENLEYYNNSGNSLILPYGKYTVELLTYDTNAAKLESDKIVSFTLSADNNFQQVTFKMTMLATSQITAHFDHLLPEGSRVSLKTAQGQLIPLEQSLYVPKAYGKTVQEGTYEVVVSLPKGYRIEGNTKVNTLPNEVHELSLRLVKVGDASDSTGDHKVMSKNNSQALTASATPTKTTTSATAKALPSAGEKMGLKLRIVGLVLLGLTCVFSRKKSTKD

SEQ ID NO: 46 - protein, 1647 aa, Streptococcus pyogenes; identical to SEQ ID NO: 45

SEQ ID NO: 47 - protein, 1647 aa, Streptococcus pyogenes; identical to SEQ ID NO: 45

SEQ ID NO: 48 - protein, 1647 aa, Streptococcus pyogenes; identical to SEQ ID NO: 45

SEQ ID NO: 49 - protein, 1647 aa, Streptococcus pyogenes; identical to SEQ ID NO: 45

SEQ ID NO: 50 - protein, 873 aa, Streptococcus pyogenes
MDLEQTKPNQVKQKIALTSTIALLSASVGVSHQVKADDRASGETKASNTHDDSLPKPETIQEAKATIDAVEKTLSQQKAELTELATALTKTTAEINHLKEQQDNEQKALTSAQEIYTNTLASSEETLLAQGAEHQRELTATETELHNAQADQHSKETALSEQKASISAETTRAQDLVEQVKTSEQNIAKLNAMISNPDAITKAAQTANDNTKALSSELEKAKADLENQKAKVKKQLTEELAAQKAALAEKEAELSRLKSSAPSTQDSIVGNNTMKAPQGYPLEELKKLEASGYIGSASYNNYYKEHADQIIAKASPGNQLNQYQDIPADRNRFVDPDNLTPEVQNELAQFAAHMINSVRRQLGLPPVTVTAGSQEFARLLSTSYKKTHGNTRPSFVYGQPGVSGHYGVGPHDKTIIEDSAGASGLIRNDDNMYENIGAFNDVHTVNGIKRGIYDSIKYMLFTDHLHGNTYGHAINFLRVDKHNPNAPVYLGFSTSNVGSLNEHFVMFPESNIANHQRFNKTPIKAVGSTKDYAQRVGTVSDTIAAIKGKVSSLENRLSAIHQEADIMAAQAKVSQLQGKLASTLKQSDSLNLQVRQLNDTKGSLRTELLAAKAKQAQLEATRDQSLAKLASLKAALHQTEALAEQAAARVTALVAKKAHLQYLRDFKLNPNRLQVIRERIDNTKQDLAKTTSSLLNAQEALAALQAKQSSLEATIATTEHQLTLLKTLANEKEYRHLDEDIATVPDLQVAPPLTGVKPLSYSKIDTTPLVQEMVKETKQLLEASARLAAENTSLVAEALVGQTSEMVASNAIVSKITSSITQPSSKTSYGSGSSTTSNLISDVDESTQRALKAGVVMLAAVGLTGFRFRKESK

SEQ ID NO: 51 - protein, 873 aa, Streptococcus pyogenes
MDLEQTKPNQVKQKIALTSTIALLSASVGVSHQVKADDRASGETKASNTHDDSLPKPETIQEAKATIEAVEKTLSQQKAELTELATALTKTTAEINHLKEQQDNEQKALTSAQEIYTNTLASSEETLLAQGAEHQRELTATETELHNAQADQHSKETALSEQKASISAETTRAQDLVEQVKTSEQNIAKLNAMISNPDAITKAAQTANDNTKALSSELEKAKADLENQKAKVKKQLTEELAAQKAALAEKEAELSRLKSSAPSTQDSIVGNNTMKAPQGYPLEELKKLEASGYIGSASYNNYYKEHADQIIAKASPGNQLNQYQDIPADRNRFVDPDNLTPEVQNELAQFAAHMINSVRRQLGLPPVTVTAGSQEFARLLSTSYKKTHGNTRPSFVYGQPGVSGHYGVGPHDKTIIEDSAGASGLIRNDDNMYENIGAFNDVHTVNGIKRGIYDSIKYMLFTDHLHGNTYGHAINFLRVDKRNPNAPVYLGFSTSNVGSLNEHFVMFPESNIANHQRFNKTPIKAVGSTKDYAQRVSTVSDTIAAIKGKVSSLENRLSAIHQEADIMAAQAKVSQLEGKLASTLKQSDSLNLQVRQLNDTKGSLRTELLAAKAKQAQLEATRDQSLAKLASLKAALHQTEALAEQAAARVTALVAKKAHLQYLRDFKLNPNRLQVIRERIDNTKQDLAKTTSSLLNAQEALAALQAKQSSLEATIATTEHQLTLLKTLANEKEYRHLDEDIATVPDLQVAPSLTGVKPLSYSKVETTPLVQEMVKETKQLLEASARLAAENTSLVAEALVGQTSEMVASNAIVSKITSSITQPSSKTSYGSGSSTTSNLISDVDESTQRALKAGVVMLAAVGLTGFRFRKESK

SEQ ID NO: 52 - protein, 873 aa, Streptococcus pyogenes
MDLEQTKPNQVKQKIALTSTIALLSASVGVSHQVKADDRASGETKASNTHDDSLPKPETIQEAKATIEAVEKTLSQQKAELTELATALTKTTAEINHLKEQQDNEQKALTSAQEIYTNTLASSEETLLAQGAEHQRELTATETELHNAQADQHSKETALSEQKASISAETTRAQDLVEQVKTSEQNIAKLNAMISNPDAITKAAQTANDNTKALSSELEKAKADLENQKAKVKKQLTEELAAQKAALAEKEAELSRLKSSAPSTQDSIVGNNTMKAPQGYPLEELKKLEASGYIGSASYNNYYKEHADQIIAKASPGNQLNQYQDIPADRNRFVDPDNLTPEVQNELAQFAAHMINSVRRQLGLPPVTVTAGSQEFARLLSTSYKKTHGNTRPSFVYGQPGVSGHYGVGPHDKTIIEDSAGASGLIRNDDNMYENIGAFNDVHTVNGIKRGIYDSIKYMLFTDHLHGNTYGHAINFLRVDKRNPNAPVYLGFSTSNVGSLNEHFVMFPESNIANHQRFNKTPIKAVGSTKDYAQRVSTVSDTIAAIKGKVSSLENRLSAIHQEADIMAAQAKVSQLEGKLASTLKQSDSLNLQVRQLNDTKGSLRTELLAAKAKQAQLEATRDQSLAKLASLKAALHQTEALAEQAAARVTALVAKKAHLQYLRDFKLNPNRLQVIRERIDNTKQDLAKTTSSLLNAQEALAALQAKQSSLEATIATTEHQLTLLKTLANEKEYRHLDEDIATVPDLQVAPSLTGVKLLSYSKVETTPLVQEMVKETKQLLEASARLAAENTSLVAEALVGQTSEMVASNAIVSKITSSITQPSSKTSYGSGSSTTSNLISDVDESTQRALKAGVVMLAAVGLTGFRFRKESK

SEQ ID NO: 53 - protein, 873 aa, Streptococcus pyogenes
MDLEQTKPNQVKQKIALTSTIALLSASVGVSHQVKADDRASGETKASNTHDDSLPKPETIQEAKATIEAVEKTLSQQKAELTELATALTKTTAEINHLKEQQDNEQKALTSAQEIYTNTLASSEETLLAQGAEHQRELTATETELHNAQADQHSKETALSEQKASISAETTRAQDLVEQVKTSEQNIAKLNAMISNPDAITKAAQTANDNTKALSSELEKAKADLENQKAKVKKQLTEELAAQKAALAEKEAELSRLKSSAPSTQDSIVGNNTMKAPQGYPLEELKKLEASGYIGSASYNNYYKEHADQIIAKASPGNQLNQYQDIPADRNRFVDPDNLTPEVQNELAQFAAHMINSVRRQLGLPPVTVTAGSQEFARLLSTSYKKTHGNTRPSFVYGQPGVSGHYGVGPHDKTIIEDSAGASGLIRNDDNMYENIGAFNDVHTVNGIKRGIYDSIKYMLFTDHLHGNTYGHAINFLRVDKRNPNAPVYLGFSTSNVGSLNEHFVMFPESNIANHQRFNKTPIKAVGSTKDYAQRVSTVSDTIAAIKGKVSSLENRLSAIHQEADIMAAQAKVSQLEGKLASTLKQSDSLNLQVRQLNDTKGSLRTELLVAKAKQAQLEATRDQSLAKLASLKAAMHQTKALAEQAAARVTALVAKKAHLQYLRDFKLNPNRLQVIRERIDNTKQDLAKTTSSLLNAQEALAALQAKQSSLEATIATTEHQLTLLKTLANEKEYRHLDEDIATVPDLQVAPSLTGVKPLSYSKVETTPLVQEMVKETKQLLEASARLAAENTSLVAEALVGQTSEMVASNAIVSKITSSITQPSSKTSYGSGSSTTSNLISDVDESTQRALKAGVVMLAAVGLTGFRFRKESR

SEQ ID NO: 54 - protein, 873 aa, Streptococcus pyogenes
MDLEQTKPNQVKQKIALTSTIALLSASVGVSHQVKADDRASGETKASNIHDDSLPKPETIQEAKATIEAVEKTLSQQKAELTELATALTKTTAEINHLKEQQDNEQKALTSAQEIYTNTLASSEETLLAQGAEHQRELTATETELHNAQADQHSKETALSEQKASISAETTRAQDLVEQVKTSEQNIAKLNAMISNPDAITKAAQTANDNTKALSSELEKAKADLENQKAKVKKQLTEELAAQKAALAEKEAELSRLKSSAPSTQDSIVGNNTMKAPQGYPLEELKKLEASGYIGSASYNNYYKEHADQIIAKASPGNQLNQYQDIPADRNRFVDPDNLTPEVQNELAQFAAHMINSVRRQLGLPPVTVTAGSQEFARLLSTSYKKTHGNTRPSFVYGQPGVSGHYGVGPHDKTIIEDSAGASGLIRNDDNMYENIGAFNDVHTVNGIKRGIYDSIKYMLFTDHLHGNTYGHAINFLRVDKRNPNAPVYLGFSTSNVGSLNEHFVMFPESNIANHQRFNKTPIKAVGSTKDYAQRVSTVSDTIAAIKGKVSSLENRLSAIHQEADIMAAQAKVSQLEGKLASTLKQSDSLNLQVRQLNDTKGSLRTELLVAKAKQAQLEATRDQSLAKLASLKAAMHQTKALAEQAAARVTALVAKKAHLQYLRDFKLNPNRLQVIRERIDNTKQDLAKTTSSLLNAQEALAALQAKQSSLEATIATTEHQLTLLKTLANEKEYRHLDEDIATVPDLQVAPSLTGVKPLSYSKVETTPLVQEMVKETKQLLEASARLAAENTSLVAEALVGQTSEMVASNAIVSKITSSITQPSSKTSYGSGSSTTSNLISDVDESTQRALKAGVVMLAAVGLTGFRFRKESR

SEQ ID NO: 55 - protein, 873 aa, Streptococcus pyogenes; identical to SEQ ID NO: 53

SEQ ID NO: 56 - protein, 873 aa, Streptococcus pyogenes
MDLEQTKPNQVKQKIALTSTIALLSASVGVSHQVKADDRASGETKASNTHDDSLPKPETIQEAKATIDAVEKTLSQQKAELTELATALTKTTAEINHLKEQQDNEQKALTSAQEIYTNTLASSEETLLAQGAEHQRELTATETELHNAQVDQHSKETALSEQKASISAETTRAQDLVEQVKTSEQNIAKLNAMISNPDAITKAAQTANDNTKALSSELEKAKADLENQKAKVKKQLTEELAAQKAALAEKEAELSRLKSSAPSTQDSIVGNNTMKAPQGYPLEELKKLEASGYIGSASYNNYYKEHADQIIAKASPGNQLNQYQDIPADRNRFVDPDNLTPEVQNELAQFAAHMINSVRRQLGLPPVTVTAGSQEFARLLSTSYKKTHGNTRPSFVYGQPGVSGHYGVGPHDKTIIEDSAGASGLIRNDDNMYENIGAFNDVHTVNGIKRGIYDSIKYMLFTDHLHGNTYGHAINFLRVDKHNPNAPVYLGFSTSNVGSLNEHFVMFPESNIANHQRFNKTPIKAVGSTKDYAQRVGTVSDTIAAIKGKVSSLENRLSAIHQEADIMAAQAKVSQLQGKLASTLKQSDSLNLQVRQLNDTKGSLRTELLVAKAKQAQLEATRDQSLAKLASLKAAMHQTKALAEQAAARVTALVAKKAHLQYLRDFKLNPNRLQVIRERIDNTKQDLAKTTSSLLNAQEALAALQAKQSSLEATIATTEHQLTLLKTLANEKEYRHLDEDIATVPDLQVAPSLTGVKPLSYSKVETTPLVQEMVKETKQLLEASARLAAENTSLVAEALVGQTSEMVASNAIVSKITSSITQPSSKTSYGSGSSTTSNLISDVDESTQRALKAGVVMLAAVGLTGFRFRKESR

SEQ ID NO: 57 - protein, 873 aa, Streptococcus pyogenes; identical to SEQ ID NO: 56

SEQ ID NO: 58 - protein, 873 aa, Streptococcus pyogenes; identical to SEQ ID NO: 56

SEQ ID NO: 59 - protein, 873 aa, Streptococcus pyogenes; identical to SEQ ID NO: 56

SEQ ID NO: 60 - protein, 873 aa, Streptococcus pyogenes; identical to SEQ ID NO: 56

SEQ ID NO: 61 - protein, 873 aa, Streptococcus pyogenes
MDLEQTKPNQVKQKIALTSTIALLSASVGVSHQVKADDRASGETKASNTHDDSLPKPETIQEAKATIDAVEKTLSQQKAELTELATALTKTTAEINHLKEQQDNEQKALTSAQEIYTNTLASSEETLLAQGAEHQRELTATETELHNAQVDQHSKETALSEQKASISAETTRAQDLVEQVKTSEQNIAKLNAMISNPDAITKAAQTANDNTKALSSELEKAKADLENQKAKVKKQLTEELAAQKAALAEKEAELSRLKSSAPSTQDSIVGNNTMKAPQGYPLEELKKLEASGYIGSASYNNYYKEHADQIIAKASPGNQLNQYQDIPADRNRFVDPDNLTPEVQNELAQFAAHMINSVRRQLGLPPVTVTAGSQEFARLLSTSYKKTHGNTRPSFVYGQPGVSGHYGVGPHDKTIIEDSAGASGLIRNDDNMYENIGAFNDVHTVNGIKRGIYDSIKYMLFTDHLHGNTYGHAINFLRVDKHNPNAPVYLGFSTSNVGSLNEHFVMFPESNIANHQRFNKTPIKAVGSTKDYAQRVGTVSDTIAAIKGKVSSLENRLSAIHQEADIMAAQAKVSQLQGKLASTLKQSDSLNLQVRQLNDTKGSLRTELLVAKAKQAQLEATRDQSLAKLASLKAAMHQTKALAEQAAARVTALVAKKAHLQYLRDFKLNPNRLQVIRERIDNTKQDLAKTTSSLLNAQEALAALQAKQSSLEATIATTEHQLTLLKTLANEKEYRHLDEDIATVPDLQVAPSLTGVKPLSYSKVETTPLVQEMVKETKQLLEASARLAAENTSLVAEALVGQTSEMVASNAIVSKITSSITQPSSKTSYGSGSSTTSNLISDVDESTQRALKAGVVMLAAVGLTGFRFRKESK

SEQ ID NO: 62 - protein, 873 aa, Streptococcus pyogenes; identical to SEQ ID NO: 61

SEQ ID NO: 63 - protein, 873 aa, Streptococcus pyogenes; identical to SEQ ID NO: 61

SEQ ID NO: 64 - protein, 873 aa, Streptococcus pyogenes
MDLEQTKPNQVKQKIALTSTIALLSASVGVSHQVKADDRASGETKASNTHDDSLPKPETIQEAKATIDAVEKTLSQQKAELTELATALTKTTAEINHLKEQQDNEQKALTSAQEIYTNTLASSEETLLAQGAEHQRELTATETELHNAQADQHSKETALSEQKASISAETTRAQDLVEQVKTSEQNIAKLNAMISNPDAITKAAQTANDNTKALSSELEKAKADLENQKAKVKKQLTEELAAQKAALAEKEAELSRLKSSAPSTQDSIVGNNTMKAPQGYPLEELKKLEASGYIGSASYNNYYKEHADQIIAKASPGNQLNQYQDIPADRNRFVDPDNLTPEVQNELAQFAAHMINSVRRQLGLPPVTVTAGSQEFARLLSTSYKKTHGNTRPSFVYGQPGVSGHYGVGPHDKTIIEDSAGASGLIRNDDNMYENIGAFNDVHTVNGIKRGIYDSIKYMLFTDHLHGNTYGHAINFLRVDKHNPNAPVYLGFSTSNVGSLNEHFVMFPESNIANHQRFNKTPIKAVGSTKDYAQRVGTVSDTIAAIKGKVSSLENRLSAIHQEADIMAAQAKVSQLQGKLASTLKQSDSLNLQVRQLNDTKGSLRTELLAAKAKQAQLEATRDQSLAKLASLKAALHQTEALAEQAAARVTALVAKKAHLQYLKDFKLNPNRLQVIRERIDNTKQDLAKTTSSLLNAQEALAALQAKQSSLEATIATTEHQLTLLKTLANEKEYRHLDEDIATVPDLQVAPSLTGVKPLSYSKVETTPLVQEMVKETKQLLEASARLAAENTSLVAEALVGQTSEMVASNAIVSKITSSITQPSSKTSYGSGSSTTSNLISDVDESTQRALKAGVVMLAAVGLTGFRFRKESR

SEQ ID NO: 65 - protein, 873 aa, Streptococcus pyogenes; identical to SEQ ID NO: 64

SEQ ID NO: 66 - protein, 873 aa, Streptococcus pyogenes; identical to SEQ ID NO: 64

SEQ ID NO: 67 - protein, 873 aa, Streptococcus pyogenes
MDLEQTKPNQVKQKIALTSTIALLSASVGVSHQVKADDRASGETKASNTHDDSLPKPETIQEAKATIDAVEKTLSQQKAELTELATALTKTTAEINHLKEQQDNEQKALTSAQEIYTNTLASSEETLLAQGAEHQRELTATETELHNAQADQHSKETALSEQKASISAETTRAQDLVEQVKTSEQNIAKLNAMISNPDAITKAAQTANDNTKALSSELEKAKADLENQKAKVKKQLTEELAAQKAALAEKEAELSRLKSSAPSTQDSIVGNNTMKAPQGYPLEELKKLEASGYIGSASYNNYYKEHADQIIAKASPGNQLNQYQDIPADRNRFVDPDNLTPEVQNELAQFAAHMINSVRRQLGLPPVTVTAGSQEFARLLSTSYKKTHGNTRPSFVYGQPGVSGHYGVGPHDKTIIEDSAGASGLIRNDDNMYENIGAFNDVHTVNGIKRGIYDSIKYMLFTDHLHGNTYGHAINFLRVDKHNPNAPVYLGFSTSNVGSLNEHFVMFPESNIANHQRFNKTPIKAVGSTKDYAQRVGTVSDTIAAIKGKVSSLENRLSAIHQEADIMAAQAKVSQLQGKLASTLKQSDSLNLQVRQLNDTKGSLRTELLAAKAKQAQLEATRDQSLAKLASLKAALHQTEALAEQAAARVTALVAKKAHLQYLRDFKLNPNRLQVIRERIDNTKQDLAKTTSSLLNAQEALAALQAKQSSLEATIATTEHQLTLLKTLANEKEYRHLDEDIATVPDLQVAPSLTGVKPLSYSKVETTPLVQEMVKETKHLLEASARLAAENTSLVAEALVGQTSEMVASNAIVSKITSSITQPSSKTSYGSGSSTTSNLISDVDESTQRALKAGVVMLAAVGLTGFRFRKESK

SEQ ID NO: 68 - protein, 873 aa, Streptococcus pyogenes
MDLEQTKPNQVKQKIALTSTIALLSASVGVSHQVKADDRASGETKASNTHDDSLPKPETIQEAKATIDAVEKTLSQQKAELTELATALTKTTAEINNLKEQQDNEQKALTSAQEIYTNTLASSEETLLAQGAEHQRELTATETELHNAQADQHSKETALSEQKASISAETTRAQDLVEQVKTSEQNIAKLNAMISNPDAITKAAQTANDNTKALSSELEKAKADLENQKAKVKKQLTEELAAQKAALAEKEAELSRLKSSAPSTQDSIVGNNTMKAPQGYPLEELKKLEASGYIGSASYNNYYKEHADQIIAKASPGNQLNQYQDIPADRNRFVDPDNLTPEVQNELAQFAAHMINSVRRQLGLPPVTVTAGSQEFARLLSTSYKKTHGNTRPSFVYGQPGVSGHYGVGPHDKTIIEDSAGASGLIRNDDNMYENIGAFNDVHTVNGIKRGIYDSIKYMLFTDHLHGNTYGHAINFLRVDKRNPNAPVYLGFSTSNVGSLNEHFVMFPESNIANHQRFNKTPIKAVGSTKDYAQRVGTVSDTIAAIKGKVSSLENRLSAIHQEADIMAAQAKVSQLQGKLASTLKQSDSLNLQVRQLNDTKGSLRTELLAAKAKQAQLEATRDQSLAKLASLKAALHQTEALAEQAAARVTALVAKKAHLQYLRDFKLNPNRLQVIRERIDNTKQDLAKTTSSLLNAQEALAALQAKQSSLEATIATTEHQLTLLKTLANEKEYRHLDEDIATVPDLQVAPSLTGVKPLSYSKVETTPLVQEMVKETKQLLEASARLAAENTSLVAEALVGQTSEMVASNAIVSKITSSITQPSSKTSYGSGSSTTSNLISDVDESTQRALKAGVVMLAAVGLTGFRFRKESR

SEQ ID NO: 69 - protein, 923 aa, Streptococcus pyogenes
MDLEQTKPNQVKQKIALTSTIALLSASVGVSHQVKADDRASGETKASNTHDDSLPKPETIQEAKATIDAVEKTLSQQKAELTELATALTKTTAEINNLKEQQDNEQKALTSAQEIYTNTLASSEETLLAQGAEHQRELTATETELHNAQADQHSKETALSEQKASISAETTRAQDLVEQVKTSEQNIAKLNAMISNPDAITKAAQTANDNTKALSSELEKAKADLENQKAKVKKQLTEELAAQKAALAEKEAELSRLKSSAPSTQDSIVGNNTMKAPQGYPLEELKKLEASGYIGSASYNNYYKEHADQIIAKASPGNQLNQYQDIPADRNRFVDPDNLTPEVQNELAQFAAHMINSVRRQLGLPPVTVTAGSQEFARLLSTSYKKTHGNTRPSFVYGQPGVSGHYGVGPHDKTIIEDSAGASGLIRNDDNMYENIGAFNDVHTVNGIKRGIYDSIKYMLFTDHLHGNTYGHAINFLRVDKRNPNAPVYLGFSTSNVGSLNEHFVMFPESNIANHQRFNKTPIKAVGSTKDYAQRVGTVSDTIAAIKGKVSSLENRLSAIHQEADIMAAQAKVSQLQGKLASTLKQSDSLNLQVRQLNDTKGSLRTELLAAKAKQAQLEATRDQSLAKLASLKAALHQTEALAEQAAARVTALVAKKAHLQYLRDFKLNPNRLQVIRERIDNTKQDLAKTTSSLLNAQEALAALQAKQSSLEATIATTEHQLTLLKTLANEKEYRHLDEDIATVPDLQVAPSLTGVKPLSYSKVETTPLVQEMVKETKQLLEASARLAAENTSLVAEALVGQTSEMVASNAIVSKITSSITQPSSKTSYGSGSSTTSNLISDVDESTQRAGQTSEMVASNAIVSKITSSITQPSSKTSYGSGSSTTSNLISDVDESTQRALKAGVVMLAAVGLTGFRFRKESR

SEQ ID NO: 70 - protein, 873 aa, Streptococcus pyogenes; identical to SEQ ID NO: 68

SEQ ID NO: 71 - protein, 873 aa, Streptococcus pyogenes
MDLEQTKPNQVKQKIALTSTIALLSASVGVSHQVKADDRASGETKASNTHDDSLPKPETIQEAKATIDAVEKTLSQQKAELTELATALTKTTAEINNLKEQQDNEQKALTSAQEIYTNTLASSEETLLAQGAEHQRELTATETELHNAQADQHSKETALSEQKASISAETTRAQDLVEQVKTSEQNIAKLNAMISNPDAITKAAQTANDNTKALSSELEKAKADLENQKAKVKKQLTEELAAQKAALAEKEAELSRLKSSAPSTQDSIVGNNTMKAPQGYPLEELKKLEASGYIGSASYNNYYKEHADQIIAKASPGNQLNQYQDIPADRNRFVDPDNLTPEVQNELAQFAAHMINSVRRQLGLPPVTVTAGSQEFARLLSTSYKKTHGNTRPSFVYGQPGVSGHYGVGPHDKTIIEDSAGASGLIRNDDNMYENIGAFNDVHTVNGIKRGIYDSIKYMLFTDHLHGNTYGHAINFLRVDKRNPNAPVYLGFSTSNVGSLNEHFVMFPESNIANHQRFNKTPIKAVGSTKDYAQRVGTVSDTIAAIKGKVSSLENRLSAIHQEADIMAAQAKVSQLQGKLASTLKQSDSLNLQVRQLNDTKGSLRTELLAAKAKQAQLEATRDQSLAKLASLKAALHQTEALAEQAAARVTALVAKKAHLQYLRDFKLNPNRLQVIRERIDNTKQDLAKTTSSLLNAQEALAALQAKQSSLEATIATTEHQLTLLKTLANEKEYRHLDEDIATVPDLQVAPSLTGVKPLSYSKVETTPLVQEMVKETKQLLEASARLAAENTSLVAEALVGQTSEMVASNAIVSKITSSITQPSSKTSYGSGSSTTSNLISDVDESTQRALKAGVVMLAAVGLTGFRFRKESK

SEQ ID NO: 72 - protein, 873 aa, Streptococcus pyogenes
MDLEQTKPNQVKQKIALTSTIALLSASVGVSHQVKADDRASGETKASNTHDDSLPKPETIQEAKATIDAVEKTLSQQKAELTKLATALTKTTAEINHLKEQQDNEQKALTSAQEIYTNTLASSEETLLAQGAEHQRELTATETELHNAQADQHSKETALSEQKASISAETTRAQDLVEQVKTSEQNIAKLNAMISNPDAITKAAQTANDNTKALSSELEKAKADLENQKAKVKKQLTEELAAQKAALAEKEAELSRLKSSAPSTQDSIVGNNTMKAPQGYPLEELKKLEASGYIGSASYNNYYKEHADQIIAKASPGNQLNQYQDIPADRNRFVDPDNLTPEVQNELAQFAAHMINSVRRQLGLPPVTVTAGSQEFARLLSTSYKKTHGNTRPSFVYGQPGVSGHYGVGPHDKTIIEDSAGASGLIRNDDNMYENIGAFNDVHTVNGIKRGIYDSIKYMLFTDHLHGNTYGHAINFLRVDKRNPNAPVYLGFSTSNVGSLNEHFVMFPESNIANHQRFNKTPIKAVGSTKDYAQRVGTVSDTIAAIKGKVSSLENRLSAIHQEADIMAAQAKVSQLEGKLASTLKQSDSLNLQVRQLNDTKGSLRTELLAAKAKQAQLEATRDQSLAKLASLKAALHQTEALAEQAAARVTALVAKKAHLQYLRDFKLNPNRLQVIRERIDNTKQDLAKTTSSLLNAQEALAALQAKQSSLEATIATTEHQLTLLKTLANENEYRHLDEDIATVPDLQVAPPLTGVKPLSYSKIDTTPLVQEMVKETKQLLEASARLAAENTSLVAEALVGQTSEMVASNAIVSKITSSITQPSSKTSYDSGSSTTSNLISDVDESTQRALKAGVVMLAAVGLTGFRFRKESK

SEQ ID NO: 73 - protein, 873 aa, Streptococcus pyogenes
MDLEQTKPNQVKQKIALTSTIALLSASVGVSHQVKADDRASGETKASNTHDDSLPKPETIQEAKATIDAVEKTLSQQKAELTKLATALTKTTAEINHLKEQQDNEQKALTSAQEIYTNTLASSEETLLAQGAEHQRELTATETELHNAQADQHSKETALSEQKASISAETTRAQDLVEQVKTSEQNIAKLNAMISNPDAITKAAQTANDNTKALSSELEKAKADLENQKAKVKKQLTEELAAQKAALAEKEAELSRLKSSAPSTQDSIVGNNTMKAPQGYPLEELKKLEASGYIGSASYNNYYKEHADQIIAKASPGNQLNQYQDIPADRNRFVDPDNLTPEVQNELAQFAAHMINSVRRQLGLPPVTVTAGSQEFARLLSTSYKKTHGNTRPSFVYGQPGVSGHYGVGPHDKTIIEDSAGASGLIRNDDNMYENIGAFNDVHTVNGIKRGIYDSIKYMLFTDHLHGNTYGHAINFLRVDKRNPNAPVYLGFSTSNVGSLNEHFVMFPESNIANHQRFNKTPIKAVGSTKDYAQRVGTVSDTIAAIKGKVSSLENRLSAIHQEADIMAAQAKVSQLQGKLASTLKQSDSLNLQVRQLNDTKGSLRTELLAAKAKQAQLEATRDQSLAKLASLKAALHQTEALAEQAAARVTALVAKKAHLQYLRDFKLNPNRLQVIRERIDNTKQDLAKTTSSLLNAQEALAALQAKQSSLEATIATTEHQLTLLKTLANEKEYRHLDEDIATVPDLQVAPPLTGVKPLSYSKIDTTPLVQEMVKETKQLLEASARLAAENTSLVAEALVGQTSEMVASNAIVSKITSSITQPSSKTSYGSGSSTTSNLISDVDESTQRALKAGVVMLAAVGLTGFRFRKESK

SEQ ID NO: 74 - protein, 873 aa, Streptococcus pyogenes
MDLEQTKPNQVKQKIALTSTIALLSASVGVSHQVKADDRASGETKASNTHDDSLPKPETIQEAKATIDAVEKTLSQQKAELTKLATALTKTTAEINHLKEQQDNEQKALTSAQEIYTNTLASSEETLLAQGAEHQRELTATETELHNAQADQHSKETALSEQKASISAETTRAQDLVEQVKTSEQNIAKLNAMISNPDAITKAAQTANDNTKALSSELEKAKADLENQKAKVKKQLTEELAAQKAALAEKEAELSRLKSSAPSTQDSIVGNNTMKAPQGYPLEELKKLEASGYIGSASYNNYYKEHADQIIAKASPGNQLNQYQDIPADRNRFVDPDNLTPEVQNELAQFAAHMINSVRRQLGLPPVTVTAGSQEFARLLSTSYKKTHGNTRPSFVYGQPGVSGHYGVGPHDKTIIEDSAGASGLIRNDDNMYENIGAFNDVHTVNGIKRGIYDSIKYMLFTDHLHGNTYGHAINFLRVDKRNPNAPVYLGFSTSNVGSLNEHFVMFPESNIANHQRFNKTPIKAVGSTKDYAQRVGTVSDTIAAIKGKVSSLENRLSAIHQEADIMAAQAKVSQLQGKLASTLKQSDSLNLQVRQLNDTKGSLRTELLAAKAKQAQLEATRDQSLAKLASLKAALHQTEALAEQAAARVTALVAKKAHLQYLRDFKLNPNRLQVIRERIDNTKQDLAKTTSSLLNAQETLAALQAKQSGLEATIATTEHQLTLLKTLANEKEYRHLDEDIATVPDLQVAPPLTGVKPLSYSKIDTTPLVQEMVKETKQLLEASARLAAENTSLVAEALVGQTSEMVASNAIVSKITSSITQPSSKTSYGSGSSTTSNLISDVDESTQRALKAGVVMLAAVGLTGFRFRKESK

SEQ ID NO: 75 - protein, 873 aa, Streptococcus pyogenes; identical to SEQ ID NO: 74

SEQ ID NO: 76 - protein, 873 aa, Streptococcus pyogenes
MDLEQTKPNQVKQKIALTSTIALLSASVGVSHQVKADDRASGETKASNTHDDSLPKPETIQEAKATIDAVEKTLSQQKAELTKLATALTKTTAEINHLKEQQDNEQKALTSAQEIYTNTLASSEETLLAQGAEHQRELTATETELHNAQVDQHSKETALSEQKASISAETTRAQDLVEQVKTSEQNIAKLNAMISNPDAITKAAQTANDNTKALSSELEKAKADLENQKAKVKKQLTEELAAQKAALAEKEAELSRLKSSAPSTQDSIVGNNTMKAPQGYPLEELKKLEASGYIGSASYNNYYKEHADQIIAKASPGNQLNQYQDIPADRNRFVDPDNLTPEVQNELAQFAAHMINSVRRQLGLPPVTVTAGSQEFARLLSTSYKKTHGNTRPSFVYGQPGVSGHYGVGPHDKTIIEDSAGASGLIRNDDNMYENIGAFNDVHTVNGIKRGIYDSIKYMLFTDHLHGNTYGHAINFLRVDKRNPNAPVYLGFSTSNVGSLNEHFVMFPESNIANHQRFNKTPIKAVGSTKDYAQRVGTVSDTIAAIKGKVSSLENRLSAIHQEADIMAAQAKVSQLQGKLASTLKQSDSLNLQVRQLNDTKGSLRTELLAAKAKQAQLEATRDQSLAKLASLKAALHQTEALAEQAAARVTALVAKKAHLQYLRDFKLNPNRLQVIRERIDNIKQDLAKTTSSLLNAQETLAALQAKQSSLEATIATTEHQLTLLKTLANEKEYRHLDEDIATVPDLQVAPPLTGVKPLSYSKIDTTPLVQEMVKETKQLLEASARLAAENTSLVAEALVGQTSEMVASNAIVSKITSSITQPSSKTSYGSGSSTTSNLISDVDESTQRALKAGVVMLAAVGLTGFRFRKESR

SEQ ID NO: 77 - protein, 873 aa, Streptococcus pyogenes
MDLEQTKPNQVKQKIALTSTIALLSASVGVSHQVKADDRASGETKASNTHDDSLPKPETIQEAKATIEAVEKTLSQQKTKLTELATALTKTTAEINHLKEQQDNEQKALTSAQEIYTNTLASSEETLLAQGAEHQRELTATETELHNAQADQHSKETALSEQKASISAETTRAQDLVEQVKTSEQNIAKLNAMINNPDAITKAAQTANDNTKALSSELEKAKADLENQKAKVKKQLTEELAAQKAALAEKEAELSRLKSSAPSTQDSIVGNNTMKAPQGYPLEELKKLEASGYIGSASYNNYYKEHADQIIAKASPGNQLNQYQDIPADRNRFVDPDNLTPEVQNELAQFAAHMINSVRRQLGLPPVTVTAGSQEFARLLSTSYKKTHGNTRPSFVYGQPGVSGHYGVGPHDKTIIEDSAGASGLIRNDDNMYENIGAFNDVHTVNGIKRGIYDSIKYMLFTDHLHGNTYGHAINFLRVDKHNPKAPVYLGFSTSNVGSLNEHFVMFPESNIANHQRFNKTPIKTVGSTKDYAQRVGTVSDTIAAIKGKVSSLENRLSAIHQEADIMAAQAKVSQLQGKLASTLKQSDSLNLQVRQLNDTKGSLRTELLAAKAKQAQLEATRDQSLAKLASLKAALHQTEALAEQAAARVTALVAKKAHLQYLRDFKLNPNRLQVIRERIDNTKQDLAKTTSSLLNAQETLAALQAKQSSLEATIATTEHQLTLLKTLANEKEYRHLDEDIATVPDLQVAPPLTGVKPLSYSKIDTTPLVQEMVKETKQLLEASARLAAENTSLVAEALVGQTSEMVASNAIVSKITSSITQPSSKTSYGSGSSTTSNLISDVDESTQRALKAGVVMLAAVGLTGFRFRKESK

SEQ ID NO: 78 - protein, 873 aa, Streptococcus pyogenes
MDLEQTKPNQVKQKIALTSTIALLSASVGVSHQVKADDRASGETKASNTHDDSLPKPETIQEAKATIDAVEKTLSQQKAELTELATALTKTTAEINHLKEQQDNEQKALTSAQEIYTNTLASSEETLLAQGAEHQRELTATETELHNAQADQHSKETALSEQKASISAETTRAQDLVEQVKTSEQNIAKLNAMISNPDAITKAAQTANDNTKALSSELEKAKADLENQKAKVKKQLTEELAAQKAALAEKEAELSRLKSSAPSTQDSIVGNNTMKVPQGYPLEELKKLEASGYIGSASYNNYYKEHADQIIAKASPGNQLNQYQDIPADRNRFVDPDNLTPEVQNELAQFAAHMINSVRRQLGLPPVTVTAGSQEFARLLSTSYKKTHGNTRPSFVYGQPGVSGHYGVGPHDKTIIEDSAGASGLIRNDDNMYENIGAFNDVHTVNGIKRGIYDSIKYMLFTDHLHGNTYGHAINFLRVDKRNPNAPVYLGFSTSNVGSLNEHFVMFPESNIANHQRFNKTPIKAVGSTKDYAQRVGTVSDTIAAIKGKVSSLENRLSAIHQEADIMAAQAKVSQLQGKLASTLKQSDSLNLQVRQLNDTKGSLRTELLAAKAKQAQLEATRDQSLAKLASLKAALHQTEVLAEQAAARVTALVAKKAHLQYLRDFKLNPNRLQVIRERIDNTKQDLAKTTSSLLNAQETLAALQAKQSSLEATIATTEHQLTLLKTLANEKGYRHLDEDIATVPDLQVAPPLTGVKPLSYSKIDTTPLVQEMVKETKQLLEASARLAAENTSLVAEALVGQTSEMVASNAIVSKITSSITQPSSKTSYGSGSSTTSNLISDVDESTQRALKAGVVMLAAVGLTGFRFRKESK

SEQ ID NO: 79 - protein, 873 aa, Streptococcus pyogenes; identical to SEQ ID NO: 78

SEQ ID NO: 80 - protein, 873 aa, Streptococcus pyogenes; identical to SEQ ID NO: 78

SEQ ID NO: 81 - protein, 873 aa, Streptococcus pyogenes; identical to SEQ ID NO: 78

SEQ ID NO: 82 - protein, 873 aa, Streptococcus pyogenes; identical to SEQ ID NO: 78

SEQ ID NO: 83 - protein, 873 aa, Streptococcus pyogenes
MDLEQTKPNQVKQKIALTSTIALLSASVGVSHQVKADDRASGETKASNTHDDSLPKPETIQEAKATIDAVEKTLSQQKAELTELATALTKTTAEINNLKEQQDNEQKALTSAQEIYTNTLASSEETLLAQGAEHQRELTATETELHNAQADQHSKETALSEQKASISAETTRAQDLVEQVKTSEQNIAKLNAMISNPDAITKAAQTANDNTKALSSELEKAKADLENQKAKVKKQLTEELAAQKAALAEKEAELSRLKSSAPSTQDSIVGNNTMKAPQGYPLEELKKLEASGYIGSASYNNYYKEHADQIIAKASPGNQLNQYQDIPADRNRFVDPDNLTPEVQNELAQFAAHMINSVRRQLGLPPVTVTAGSQEFARLLSTSYKKTHGNTRPSFVYGQPGVSGHYGVGPHDKTIIEDSAGASGLIRNDDNMYENIGAFNDVHTVNGIKRGIYDSIKYMLFTDHLHGNTYGHAINFLRVDKRNPNAPVYLGFSTSNVGSLNEHFVMFPESNIANHQRFNKTPIKAVGSTKDYAQRVGTVSDTIAAIKGKVSSLENRLSAIHQEADIMAAQAKVSQLQGKLASTLKQSDSLNLQVRQLNDTKGSLRTELLAAKAKQAQLEATRDQSLAKLASLKAALHQTEALAEQAAARVTALVAKKAHLQYLRDFKLNPNRLQVIRERIDNTKQDLAKTTSSLLNAQETLAALQAKQSSLEATIATTEHQLTLLKTLANEKEYRHLDEDIATVPDLQVAPSLTGVKPLSYSKIDTTPLVQEMVKETKQLLEASARLAAENTSLVAEALVGQTSEMVASNAIVSKITSSITQPSSKTSYGSGSSTTSNLISDVDESTQRALKAGVVMLAAVGLTGFRFRKESK

SEQ ID NO: 84 - protein, 873 aa, Streptococcus pyogenes
MDLEQTKPNQVKQKIALTSTIALLSASVGVSHQVKADDRASGETKASNTHDDSLPKPETIQEAKATIDAVEKTLSQQKAELTELATALTKTTAEINHLKEQQDNEQKALTSAQEIYTNTLASSEETLLAQGAEHQRELTATETELHNAQVDQHSKETALSEQKASISAETTRAQDLVEQVKTSEQNIAKLNAMISNPDAITKAAQTANDNTKALSSELEKAKADLENQKAKVKKQLTEELAAQKAALAEKEAELSRLKSSAPSTQDSIVGNNTMKAPQGYPLEELKKLEASGYIGSASYNNYYKEHADQIIAKASPGNQLNQYQDIPADRNRFVDPDNLTPEVQNELAQFAAHMINSVRRQLGLPPVTVTAGSQEFARLLSTSYKKTHGNTRPSFVYGQPGVSGHYGVGPHDKTIIEDSAGASGLIRNDDNMYENIGAFNDVHTVNGIKRGIYDSIKYMLFTDHLHGNTYGHAINFLRVDKRNPNAPVYLGFSTSNVGSLNEHFVMFPESNIANHQRFNKTPIKAVGSTKDYAQRVGTVSDTIAAIKGKVSSLENRLSAIHQEADIMAAQAKVSQLEGKLASTLKQSDSLNLQVRQLNDTKGSLRTELLAAKAKQAQLEATRDQSLAKLASLKAALHQTEALAEQAAARVTALVAKKAHLQYLRDFKLNPNRLQVIRERIDNTKQDLAKTTSSLLNAQEALAALQAKQSSLEATIATTEHQLTLLKTLANEKEYRHLDEDIATVPDLQVAPPLTGVKPLSYSKIDTTPLVQEMVKETKQLLEASARLAAENTSLVAEALVGQTSEMVASNAIVSKITSSITQPSSKTSYGSGSSTTSNLISDVDESTQRALKAGVVMLAAVGLTGFRFRKESK

SEQ ID NO: 85 - protein, 873 aa, Streptococcus pyogenes
MDLEQTKPNQVKQKIALTSTIALLSASVGVSHQVKADDRASGETKASNTHDDSLPKPETIQEAKATIDAVEKTLSQQKAELTELATALTKTTAEINHLKEQQDNEQKALTSAQEIYTNTLASSEETLLAQGAEHQRELTATETELHNAQVDQHSKETALSEQKASISAETTRAQDLVEQVKTSEQNIAKLNAMISNPDAITKAAQTANDNTKALSSELEKAKADLENQKAKVKKQLTEELAAQKAALAEKEAELSRLKSSAPSTQDSIVGNNTMKAPQGYPLEELKKLEASGYIGSASYNNYYKEHADQIIAKASPGNQLNQYQDIPADRNRFVDPDNLTPEVQNELAQFAAHMINSVRRQLGLPPVTVTAGSQEFARLLSTSYKKTHGNTRPSFVYGQPGVSGHYGVGPHDKTIIEDSAGASGLIRNDDNMYENIGAFNDVHTVNGIKRGIYDSIKYMLFTDHLHGNTYGHAINFLRVDKRNPNAPVYLGFSTSNVGSLNEHFVMFPESNIANHQRFNKTPIKAVGSTKDYAQRVGTVSDTIAAIKGKVSSLENRLSAIHQEADIMAAQAKVSQLEGKLASTLKQSDSLNLQVRQLNDTKGSLRTELLAAKAKQAQLEATRDQSLAKLASLKAALHQTEALAEQAAARVTALVAKKAHLQYLRDFKLNPNRLQVIRERIDNTKQDLAKTTSSLLNAQEALAALQAKQSSLEATIATTEHQLTLLKILANEKEYRHLDEDIATVPDLQVAPPLTGVKPLSYSKIDTTPLVQEMVKETKQLLEASARLAAENTSLVAEALVGQTSEMVASNAIVSKITSSITQPSSKTSYGSGSSTTSNLISDVDESTQRALKAGVVMLAAVGLTGFRFRKESK

SEQ ID NO: 86 - protein, 873 aa, Streptococcus pyogenes; identical to SEQ ID NO: 84

SEQ ID NO: 87 - protein, 873 aa, Streptococcus pyogenes; identical to SEQ ID NO: 84

SEQ ID NO: 88 - protein, 873 aa, Streptococcus pyogenes; identical to SEQ ID NO: 84

SEQ ID NO: 89 - protein, 873 aa, Streptococcus pyogenes
MDLEQTKPNQVKQKIALTSTIALLSASVGVSHQVKADDRASGETKASNTHDDSLPKPETIQEAKATIDAVEKTLSQQKAELTELATALTKTTAEINHLKEQQDNEQKALTSAQEIYTNTLASSEETLLAQGAEHQRELTATETELHNAQVDQHSKETALSEQKASISAETTRAQDLVEQVKTSEQNIAKLNAMISNPDAITKAAQTANDNTKALSSELEKAKADLENQKAKVKKQLTEELAAQKAALAEKEAELSRLKSSAPSTQDSIVGNNTMKAPQGYPLEELKKLEASGYIGSASYNNYYKEHADQIIAKASPGNQLNQYQDIPADRNRFVDPDNLTPEVQNELAQFAAHMINSVRRQLGLPPVTVTAGSQEFARLLSTSYKKTHGNTRPSFVYGQPGVSGHYGVGPHDKTIIEDSAGASGLIRNDDNMYENIGAFNDVHTVNGIKRGIYDSIKYMLFTDHLHGNTYGHAINFLRVDKRNPNAPVYLGFSTSNVGSLNEHFVMFPESNIANHQRFNKTPIKAVGSTKDYAQRVGTVSDTIAAIKGKVSSLENRLSAIHQEADIMAAQAKVSQLEGKLASTLKQSDSLNLQVRQLNDTKGSLRTELLAAKAKQAQLEATRDQSLAKLASLKAALHQTEALAEQAAARVTALVAKKAHLQYLRDFKLNPNRLQVIRERIDNTKQDLAKTTSSLLNAQEALAVLQAKQSSLEATIATTEHQLTLLKTLANEKEYRHLDEDIATVPDLQVAPPLTGVKPLSYSKIDTTPLVQEMVKETKQLLEASARLAAENTSLVAEALVGQTSEMVASNAIVSKITSSITQPSSKTSYGSGSSTTSNLISDVDESTQRALKAGVVMLAAVGLTGFRFRKESR

SEQ ID NO: 90 - protein, 873 aa, Streptococcus pyogenes
MDLEQTKPNQVKQKIALTSTIALLSASVGVSHQVKADDRASGETKASNTHDDSLPKPETIQEAKATIDAVEKTLSQQKAELTELATALTKTTAEINHLKEQQDNEQKALTSAQEIYTNTLASSEETLLAQGAEHQRELTATETELHNAQADQHSKETALSEQKASISAETTRAQDLVEQVKTSEQNIAKLNAMISNPDAITKAAQTANDNTKALSSELEKAKADLENQKAKVKKQLTEELAAQKAALAEKEAELSRLKSSAPSTQDSIVGNNTMKAPQGYPLEELKKLEASGYIGSASYNNYYKEHADQIIAKASPGNQLNQYQDIPADRNRFVDPDNLTPEVQNELAQFAAHMINSVRRQLGLPPVTVTAGSQEFARLLSTSYKKTHGNTRPSFVYGQPGVSGHYGVGPHDKTIIEDSAGASGLIRNDDNMYENIGAFNDVHTVNGIKRGIYDSIKYMLFTDHLHGNTYGHAINFLRVDKRNPNAPVYLGFSTSNVGSLNEHFVMFPESNIANHQRFNKTPIKAVGSTKDYAQRVGTVSDTIAAIKGKVSSLENRLSAIHQEADIMAAQAKVSQLEGKLASTLKQSDSLNLQVRQLNDTKGSLRTELLAAKAKQAQLEATRDQSLAKLASLKAALHQTEALAEQAAARVTALVAKKAHLQYLRDFKLNPNRLQVIRERIDNTKQDLAKTTSSLLNAQEALAALQAKQSSLEATIATTEHQLTLLKTLANEKEYRHLDEDIATVPDLQVAPPLTGVKPLSYSKIDTTPLVQEMVKETKQLLEASARLAAENTSLVAEALVGQTSEMVASNAIVSKITSSITQPSSKTSYGSGSSTTSNLISDVDESTQRALKAGVVMLAAVGLTGFRFRKESK

SEQ ID NO: 91 - protein, 873 aa, Streptococcus pyogenes; identical to SEQ ID NO: 77

SEQ ID NO: 92 - protein, 873 aa, Streptococcus pyogenes; identical to SEQ ID NO: 77

SEQ ID NO: 93 - protein, 873 aa, Streptococcus pyogenes; identical to SEQ ID NO: 77

SEQ ID NO: 94 - protein, 873 aa, Streptococcus pyogenes
MDLEQTKPNQVKQKIALTSTIALLSASVGVSHQVKADDRASGETKASNTHDDSLPKPETIQEAKATIEAVEKTLSQQKAKLTELATALTKTTAEINHLKEQQDNEQKALTSAQEIYTNTLASSEETLLAQGAEHQRELTATETELHNAQADQHSKETALSEQKASISAETTRAQDLVEQVKTSEQNIAKLNAMISNPDAITKAAQTANDNTKALSSELEKAKADLENQKAKVKKQLTEELAAQKAALAEKEAELSRLKSSAPSTQDSIVGNNTMKAPQGYPLEELKKLEASGYIGSASYNNYYKEHADQIIAKASPGNQLNQYQDIPADRNRFVDPDNLTPEVQNELAQFAAHMINSVRRQLGLPPVTVTAGSQEFARLLSTSYKKTHGNTRPSFVYGQPGVSGHYGVGPHDKTIIEDSAGASGLIRNDDNMYENIGAFNDVHTVNGIKRGIYDSIKYMLFTDHLHGNTYGHAINFLRVDKHNPKAPVYLGFSTSNVGSLNEHFVMFPESNIANHQRFNKTPIKTVGSTKDYAQRVGTVSDTIAAIKGKVSSLENRLSAIHQEADIMAAQAKVSQLQGKLASTLKQSDSLNLQVRQLNDTKGSLRTELLAAKAKQAQLEATRDQSLAKLASLKAALHQTEALAEQAAARVTALVAKKAHLQYLRDFKLNPNRLQVIRERIDNTKQDLAKTTSSLLNAQETLAALQAKQSSLEATIATTEHQLTLLKTLANEKEYRHLDEDIATVPDLQVAPPLTGVKPLSYSKIDTTPLVQEMVKETKQLLEASARLAAENTSLVAEALVGQTSEMVASNAIVSKITSSITQPSSKTSYGSGSSTTSNLISDVDESTQRALKAGVVMLAAIGLTGFRFRKESK

SEQ ID NO: 95 - protein, 873 aa, Streptococcus pyogenes; identical to SEQ ID NO: 94

SEQ ID NO: 96 - protein, 873 aa, Streptococcus pyogenes
MDLEQTKPNQVKQKIALTSTIALLSASVGVSHQVKADDRASEETKASNTHDDSLPKPETIQEAKATIEAVEKTLSQQKTKLTELATALTKTTAEINHLKEQQDNEQKALTSAQEIYTNTLASSEETLLAQGAEHQRELTATETELHNAQADQHSKETALSEQKASISAETTRAQDLVEQVKTSEQNIAKLNAMISNPDAITKAAQTANDNTKALSSELEKAKADLENQKAKVKKQLTEELAAQKAALAEKEAELSRLKSSAPSTQDSIVGNNTMKAPQGYPLEELKKLEASGYIGSASYNNYYKEHADQIIAKASPGNQLNQYQDIPADRNRFVDPDNLTPEVQNELAQFAAHMINSVRRQLGLPPVTVTAGSQEFARLLSTSYKKTHGNTRPSFVYGQPGVSGHYGVGPHDKTIIEDSAGASGLIRNDDNMYENIGAFNDVHTVNGIKRGIYDSIKYMLFTDHLHGNTYGHAINFLRVDKRNPNAPVYLGFSTSNVGSLNEHFVMFPESNIANHQRFNKTPIKAVGSTKDYAQRVGTVSDTIAAIKGKVSSLENRLSAIHQEADIMAAQAKVSQLQGKLASTLKQSDSLNLQVRQLNDTKGSLRTELLAAKAKQAQLEATRDQSLAKLASLKAALHQTEALAEQAAARVTALVAKKAHLQYLRDFKLNPNRLQVIRERIDNTKQDLAKTTSSLLNAQEALAALQAKQSSLEATIATTEHQLTLLKTLANEKEYRHLDEDIATVPDLQVAPPLTGVKPLSYSKIDTTPLVQEMVKETKQLLEASARLAAENTSLVAEALVGQTSEMVASNAIVSKITSSITQPSSKTSYGSGSSTTSNLISDVDESTQRALKAGVVMLAAVGLTGFRFRKESK

SEQ ID NO: 97 - protein, 853 aa, Streptococcus pyogenes
MDLEQTKPNQVKQKIALTSTIALLSASVGVSHQVKADDRASEETKASNTHDDSLPKPETIQEAKATIEAVEKTLSQQKTKLTELATALTKTTAEINHLKEQQDNEQKALTSAQEIYTNTLASSEETLLAQGAEHQRELTATETELHNAQADQHSKETALSEQKASISAETTRAQDLVEQVKTSEQNIAKLNAMISNPDAITKAAQTANDNTKALSSELEKAKADLENQKAKVKKQLTEELAAQKAALAEKEAELSRLKSSAPSTQDSIVGNNTMKAPQGYPLEELKKLEASGYIGSASYNNYYKEHADQIIAKASPGNQLNQYQDIPADRNRFVDPDNLTPEVQNELAQFAAHMINSVRRQLGLPPVTVTAGSQEFARLLSTSYKKTHGNTRPSFVYGQPGVSGHYGVGPHDKTIIEDSAGASGLIRNDDNMYENIGAFNDVHTVNGIKRGIYDSIKYMLFTDHLHGNTYGHAINFLRVDKRNPNAPVYLGFSTSNVGSLNEHFVMFPESNIANHQRFNKTPIKAVGSTKDYAQRVGTVSDTIAAIKGKVSSLENRLSAIHQEADIMAAQAKVSQLQGKLASTLKQSDSLNLQVRQLNDTKGSLRTELLAAKAKQAQLEATRDQSLAKLASLKAALHQTEALAEQAAARVTALVAKKAHLQYLRDFKLNPNRLQVIRERIDNTKQDLAKTTSSLLNAQEALAALQAKQSSLEATIATTEHQLTLLKTLANEKEYRHLDEDIATVPDLQVAPPLTGVKPLSYSKIDTTPLVQEMVKETKQLLEASARLAAENTSLVAEALVGQTSEMVASNAIVSKITSSITQPSSKTSYGSGSSTTSNLISDVDESTQRALKA

SEQ ID NO: 98 - protein, 873 aa, Streptococcus pyogenes
MDLEQTKPNQVKQKIALTSTIALLSASVGVSHQVKADDRASGETKASNTHDDSLPKPETIQEAKATIEAVEKTLSQQKAKLTELATALTKTTAEINHLKEQQDNEQKALTSAQEIYTNTLASSEETLLAQGAEHQRELTATETELHNAQVDQHSKETALSEQKASISAETTRAQDLVEQVKTSEQNIAKLNAMISNPDAITKAAQTANDNTKALSSELEKAKADLENQKAKVKKQLTEELAAQKAALAEKEAELSRLKSSAPSTQDSIVGNNTMKAPQGYPLEELKKLEASGYIGSASYNNYYKEHADQIIAKASPGNQLNQYQDIPADRNRFVDPDNLTPEVQNELAQFAAHMINSVRRQLGLPPVTVTAGSQEFARLLSTSYKKTHGNTRPSFVYGQPGVSGHYGVGPHDKTIIEDSAGASGLIRNDDNMYENIGAFNDVHTVNGIKRGIYDSIKYMLFTDHLHGNTYGHAINFLRVDKRNPNAPVYLGFSTSNVGSLNEHFVMFPESNIANHQRFNKTPIKAVGSTKDYAQRVGTVSDTIAAIKGKVSSLENRLSAIHQEADIMAAQAKVSQLQGKLASTLKQSDSLNLQVRQLNDTKGSLRTELLAAKAKQAQLEATRDQSLAKLASLKAALHQTEALAEQAAARVTALVAKKAHLQYLRDFKLNPNRLQVIRERIDNTKQDLAKTTSSLLNAQEALAALQAKQSSLEATIATTEHQLTLLKTLANEKEYRHLDEDIATVPDLQVAPPLTGVKPLSYSKIDTTPLVQEMVKETKQLLEASARLAAENTSLVAEALVGQTSEMVASNAIVSKITSSITQPSSKTSYGSGSSTTSNLISDVDESTQRALKAGVVMLAAVGLTGFRFRKESK

SEQ ID NO: 99 - protein, 873 aa, Streptococcus pyogenes
MDLEQPKPNQVKQKIALTSTIALLSASVGVSHHVKADDLAPEGAKASNTSEESLPKTETCEEAKAAVEAVETNLNQQKAELTELATALTKTTAEINHLKEQQDNEQKALTSAQEIYTNTLASSEETLLAQGAEYQRELTATETELHNAQVDQHSKETALSEQKASISAETTRAQDLVEQVKTSEQNIAKLNAMISNPDAITKAAQTANDNTKALSSELEKAKADLENQKAKVKKQLTEELAAQKAALAEKEAELSRLKSSAPSTQDSIVGTNTMKAPQGYPLEELKKLEASGYIGSASYNNYYKEHADQIIAKASPGNQLNQYQDIPADRTRFVDPDNLTPEVQNELAQFAAHMINSVRRQLGLPPVTVTAGSQEFARLLSTSYKKTHGNTRPSFVYGQPGASGHYGVGPHDKTIIEDSAGASGLIRNDDNMYENIGAFNDVHTVNGIKRGIYDSIKYMLFTDHLHGNTYGHAINFLRVDKHNPNAPVYLGFSTSNVGSLNEHFVMFPESNIANHQRFNKTPIKAVGSTKDYAQRVGTVSDTIAAIKGKVSSLENRLSAIHQEADIMAAQAKVSQLQGKLASTLKQSDSLNLQVRQLNDTKGSLRTELLVAKAKQAQLEATRDQSLAKLASLKAAMHQTKALAEQAAARVTALVAKKAHLQYLRDFKLNPNRLQVIRERIDNTKQDLAKTTSSLLNAQETLAALQAKKSSLEATIATTEHQLTLLKTLANEKEYRHLDEDIATVPDLQVAPPLTGVKPLSYSKIDTTPLVQEMVKETKQLLEASARLAAENTSLVAEALVGQTSEMVASNAIVSKITSSITQPSSKTSYGSGSSTTSNLISDIDESTQRALKAGVVMLAAVGLTGVKLRKDTK

SEQ ID NO: 100 - protein, 873 aa, Streptococcus pyogenes; identical to SEQ ID NO: 50

SEQ ID NO: 101 - protein, 873 aa, Streptococcus pyogenes; identical to SEQ ID NO: 50

SEQ ID NO: 102 - protein, 873 aa, Streptococcus pyogenes; identical to SEQ ID NO: 50

SEQ ID NO: 103 - protein, 873 aa, Streptococcus pyogenes; identical to SEQ ID NO: 50

SEQ ID NO: 104 - protein, 873 aa, Streptococcus pyogenes; identical to SEQ ID NO: 50

SEQ ID NO: 105 - protein, 873 aa, Streptococcus pyogenes; identical to SEQ ID NO: 50

SEQ ID NO: 106 - protein, 873 aa, Streptococcus pyogenes; identical to SEQ ID NO: 50

SEQ ID NO: 107 - protein, 571 aa, Streptococcus pyogenes
MSNKKTFKKYSRVAGLLTAALIIGNLVTANAESNKQNTASTETTTTNEQPKPESSELTTEKAGQKTDDMLNSNDMIKLAPKEMPLESAEKEEKKSEDKKKSEEDHTEEINDKIYSLNYNELEVLAKNGETIENFVPKEGVKKADKFIVIERKKKNINTTPVDISIIDSVTDRTYPAALQLANKGFTENKPDAVVTKRNPQKIHIDLPGMGDKATVEVNDPTYANVSTAIDNLVNQWHDNYSGGNTLPARTQYTESMVYSKSQIEAALNVNSKILDGTLGIDFKSISKGEKKVMIAAYKQIFYTVSANLPNNPADVFDKSVTFKELQRKGVSNEAPPLFVSNVAYGRTVFVKLETSSKSNDVEAAFSAALKGTDVKTNGKYSDILENSSFTAVVLGGDAAEHNKVVTKDFDVIRNVIKDNATFSRKNPAYPISYTSVFLKNNKIAGVNNRTEYVETTSTEYTSGKINLSHQGAYVAQYEILWDEINYDDKGKEVITKRRWDNNWYSKTSPFSTVIPLGANSRNIRIMARECTGLAWEWWRKVIDERDVKLSKEINVNISGSTLSPYGSITYK

SEQ ID NO: 108 - protein, 571 aa, Streptococcus pyogenes
MSNKKTFKKYSRVAGLLTAALIIGNLVTANAESNKQNTASTETTTTNEQPKPESSELTTEKAGQKMDDMLNSNDMIKLAPKEMPLESAEKEEKKSEDKKKSEEDHTEEINDKIYSLNYNELEVLAKNGETIENFVPKEGVKKADKFIVIERKKKNINTTPVDISIIDSVTDRTYPAALQLANKGFTENKPDAVVTKRNPQKIHIDLPGMGDKATVEVNDPTYANVSTAIDNLVNQWHDNYSGGNTLPARTQYTESMVYSKSQIEAALNVNSKILDGTLGIDFKSISKGEKKVMIAAYKQIFYTVSANLPNNPADVFDKSVTFKELQRKGVSNEAPPLFVSNVAYGRTVFVKLETSSKSNDVEAAFSAALKGTDVKTNGKYSDILENSSFTAVVLGGDAAEHNKVVTKDFDVIRNVIKDNATFSRKNPAYPISYTSVFLKNNKIAGVNNRSEYVETTSTEYTSGKINLSHQGAYVAQYEILWDEINYDDKGKEVITKRRWDNNWYSKTSPFSTVIPLGANSRNIRIMARECTGLAWEWWRKVIDERDVKLSKEINVNISGSTLSPYGSITYK

SEQ ID NO: 109 - protein, 571 aa, Streptococcus pyogenes; identical to SEQ ID NO: 108

SEQ ID NO: 110 - protein, 571 aa, Streptococcus pyogenes; identical to SEQ ID NO: 108

SEQ ID NO: 111 - protein, 571 aa, Streptococcus pyogenes; identical to SEQ ID NO: 108

SEQ ID NO: 112 - protein, 521 aa, Streptococcus pyogenes
MSNKKTFKKYSRVAGLLTAALIIGNLVTANAESNKQNTTSTETTTTNEQPKPESSELTIEKAGQKMDDMLNSNDMIKLAPKEMPLESAEKEEKKSEDKKKSEEDHTEEINDKIYSLNYNELEVLAKNGETIENFVPKEGVKKADKFIVIERKKKNINTTPVDISIIDSVTDMTYPAALQLADKGFTENKPDAVVTKRNPQKIHIDLPGMGDKATVEVNDPTYANVSTAIDNLVNQWHDNYSGGNTLPARTFYTVSANLPNNPADVFDKSVTFKELQRKGVSNEAPPLFVSNVAYGRTVFVKLETSSKSNDVEAAFSAALKGTDVKTNGKYSDILENSSFTAVVLGGDAAEHNKVVTKDFDVIRNVIKDNATFSRKNPAYPISYTSVFLKNNKIAGVNNRTEYVETTSTEYTSGKINLSHRGAYVAQYEILWDEINYDDKGKEVITKRRWDNNWYSKTSPFSTVIPLGANSRNIRIMARECTGLAWEWWRKVIDERDVKLSKEINVNISGSTLSPYGSITYK

SEQ ID NO: 113 - protein, 571 aa, Streptococcus pyogenes
MSNKKTFKKYSRVAGLLTAALIIGNLVTANAESNKQNTASTETTTTNEQPKPESSELTIEKAGQKMDDMLNSNDMIKLAPKEMPLESAEKEEKKSEDKKKSEEDHTEEINDKIYSLNYNELEVLAKNGETIENFVPKEGVKKADKFIVIERKKKNINTTPVDISIIDSVTDMTYPAALQLADKGFTENKPDAVVTKRNPQKIHIDLPGMGDKATVEVNDPTYANVSTAIDNLVNQWHDNYSGGNTLPARTQYTESMVYSKSQIEAALNVNSKILDGTLGIDFKSISKGEKKVMIAAYKQIFYTVSANLPNNPADVFDKSVTFKELQRKGVSNEAPPLFVSNVAYGRTVFVKLETSSKSNDVEAAFSAALKGTDVKTNGKYSDILENSSFTAVVLGGDAAEHNKVVTKDFDVIRNVIKDNATFSRKNPAYPISYTSVFLKNNKIAGVNNRTEYVETTSTEYTSGKINLSHRGAYVAQYEILWDEINYDDKGKEVITKRRWDNNWYSKTSPFSTVIPLGANSRNIRIMARECTGLAWEWWRKVIDERDVKLSKEINVNISGSTLSPYGSITYK

SEQ ID NO: 114 - protein, 571 aa, Streptococcus pyogenes
MSNKKTFKKYSRVAGLLTVALIIGNLVTANAESNKQNTASTETTTTNEQPKPESSELTIEKAGQKMDDMLNSNDMIKLAPKEMPLESAEKEEKKSEDKKKSEEDHTEEINDKIYSLNYNELEVLAKNGETIENFVPKEGVKKADKFIVIERKKKNINTTPVDISIIDSVTDRTYPAALQLANKGFTENKPDAVVTKRNPQKIHIDLPGMGDKATVEVNDPTYANVSTAIDNLVNQWHDNYSGGNTLPARTQYTESMVYSKSQIEAALNVNSKILDGTLGIDFKSISKGEKKVMIAAYKQIFYTVSANLPNNPADVFDKSVTFKDLQRKGVSNEAPPLFVSNVAYGRTVFVKLETSSKSNDVEAAFSAALKGTDVKTNGKYSDILENSSFTAVVLGGDAAEHNKVVTKDFDVIRNVIKDNATFSRKNPAYPISYTSVFLKNNKIAGVNNRTEYVETTSTEYTSGKINLSHQGAYVAQYEILWDEINYDDKGKEVITKRRWDNNWYSKTSPFSTVIPLGANSRNIRIMARECTGLAWEWWRKVIDERDVKLSKEINVNISGSTLSPYGSITYK

SEQ ID NO: 115 - protein, 571 aa, Streptococcus pyogenes
MSNKKTFKKYSRVAGLLTAALIIGNLVTANAESNKQNTASTETTTTNEQPKPESSELTTEKAGQKTDDMLNSNDMIKLAPKEMPLESAEKEEKKSEDKKKSEEDHTEEINDKIYSLNYNELEVLAKNGETIENFVPKEGVKKADKFIVIERKKKNINTTPVDISIIDSVTDRTYPAALQLANKGFTENKPDAVVTKRNPQKIHIDLPGMGDKATVEVNDPTYANVSTAIDNLVNQWHDNYSGGNTLPARTQYTESMVYSKSQIEAALNVNSKILDGTLGIDFKSISKGEKKVMIAAYKQIFYTVSANLPNNPADVFDKSVTFKELQRKGVSNEAPPLFVSNVAYGRTVFVKLETSSKSNDVEAAFSAALKGTDVKTNGKYSDILENSSFTAVVLGGDAAEHNKVVTKDFDVIRNVIKDNATFSRKNPAYPISYTSVFLKNNKIAGVNNRTEYVETTSTEYTSGKINLSHRGAYVAQYEILWDEINYDDKGKEVITKRRWDNNWYSKTSPFSTVIPLGANSRNIRIMARECTGLAWEWWRKVIDERDVKLSKEINVNISGSTLSPYGSITYK

SEQ ID NO: 116 - protein, 521 aa, Streptococcus pyogenes
MSNKKTFKKYSRVAGLLTAALIIGNLVTANAESNKQNTASTETTTTNEQPKPESSELTTEKAGQKTDDMLNSNDMIKLAPKEMPLESAEKEEKKSEDKKKRKKKNINTTPVDISIIDSVTDRTYPAALQLANKGFTENKPDAVVTKRNPQKIHIDLPGMGDKATVEVNDPTYANVSTAIDNLVNQWHDNYSGGNTLPARTQYTESMVYSKSQIEAALNVNSKILDGTLGIDFKSISKGEKKVMIAAYKQIFYTVSANLPNNPADVFDKSVTFKDLQRKGVSNEAPPLFVSNVAYGRTVFVKLETSSKSNDVEAAFSAALKGTDVKTNGKYSDILENSSFTAVVLGGDAAEHNKVVTKDFDVIRNVIKDNATFSRKNPAYPISYTSVFLKNNKIAGVNNRTEYVETTSTEYTSGKINLSHQGAYVAQYEILWDEINYDDKGKEVITKRRWDNNWYSKTSPFSTVIPLGANSRNIRIMARECTGLAWEWWRKVIDERDVKLSKEINVNISGSTLSPYGSITYK

SEQ ID NO: 117 - protein, 571 aa, Streptococcus pyogenes; identical to SEQ ID NO: 107

SEQ ID NO: 118 - protein, 571 aa, Streptococcus pyogenes; identical to SEQ ID NO: 107

SEQ ID NO: 119 - protein, 571 aa, Streptococcus pyogenes
MSNKKTFKKYSRVAGLLTAALIIGNLVTANAESNKQNTASTETTTTNEQPKPESSELTTEKAGQKTDDMLNSNDMIKLAPKEMPLESAEKEEKKSEDKKKSEEDHTEEINDKIYSLNYNELEVLAKNGETIENFAPKEGVKKADKFIVIERKKKNINTTPVDISIIDSVTDRTYPAALQLANKGFTENKPDAVVTKRNPQKIHIDLPGMGDKATVEVNDPTYANVSTAIDNLINQWHDNYSGGNTLPARTQYTESMVYSKSQIEAALNVNSKILDGTLGIDFKSISKGEKKVMIAAYKQIFYTVSANLPNNPADVFAKSVTFKELQRKGVSNEAPPLFVSNVAYGRTVFVKLETSSKSNDVEAAFSAALKGTDVKTNGKYSDILENSSFTAVVLGGDAAEHNKVVTKDFDVIRNVIKDNATFSRKNPAYPISYTSVFLKNNKIAGVNNRTEYVETTSTEYTSGKINLSHQGAYVAQYEILWDEINYDDKGKEVITKRRWDNNWYSKTSPFSTVIPLGANSRNIRIMARECTGLAWEWWRKVIDERDVKLSKEINVNISGSTLSPYGSITYK

SEQ ID NO: 120 - protein, 543 aa, Streptococcus pyogenes
MASESNKQNTASTETTTTNEQPKPESSELTTEKAGQKTDDMLNSNDMIKLAPKEMPLESAEKEEKKSEDKKKSEEDHTEEINDKIYSLNYNELEVLAKNGETIENFVPKEGVKKADKFIVIERKKKNINTTPVDISIIDSVTDRTYPAALQLANKGFTENKPDAVVTKRNPQKIHIDLPGMGDKATVEVNDPTYANVSTAIDNLVNQWHDNYSGGNTLPARTQYTESMVYSKSQIEAALNVNSKILDGTLGIDFKSISKGEKKVMIAAYKQIFYTVSANLPNNPADVFDKSVTFKELQRKGVSNEAPPLFVSNVAYGRTVFVKLETSSKSNDVEAAFSAALKGTDVKTNGKYSDILENSSFTAVVLGGDAAEHNKVVTKDFDVIRNVIKDNATFSRKNLAYPISYTSVFLKNNKIAGVNNRTEYVETTSTEYTSGKINLSHQGAYVAQYEILWDEINYDDKGKEVITKRRWDNNWYSKTSPFSTVIPLGANSRNIRIMARECTGLAWEWWRKVIDERDVKLSKEINVNISGSTLSPYGSITYK

SEQ ID NO: 121 - protein, 571 aa, Streptococcus pyogenes
MSNKKTFKKYSRVAGLLTAALIIGNLVTANAESNKQNTASTETTTTNEQPKPESSELTTEKAGQKTDDMLNSNDMIKLAPKEMPLESAEKEEKKSEDKKKSEEDHTEEINDKIYSLNYNELEVLAKNGETIENFVPKEGVKKADKFIVIERKKKNINTTPVDISIIDSVTDRTYPAALQLANKGFTENKPDAVVTKRNPQKIHIDLPGMGDKATVEVNDPTYANVSTAIDNLVNQWHDNYSGGNTLPARTQYTESMVYSKSQIEAALNVNSKILDGTLGIDFKSISKGEKKVMIAAYKQIFYTVSANLPNNPADVFDKSVTFKELQRKGVSNEAPPLFVSNVAYGRTVFVKLETSSKSNDVEAAFSAALKGTDVKTNGKYSDILENSSFTAVVLGGDAAEHNKVVTKDFDVIRNVIKDNATFSRKNPAYPISYTSVFLKNNKIAGVNNRTEYVETTSTEYTSGKINLSHQGAYVAQYEILWDEINYDDKGKEVITKRRWDNNWYSKTSPFSTVIPLGANSRNIRIMARECTGLAFEWWRKVIDERDVKLSKEINVNISGSTLSPYGSITYK

SEQ ID NO: 122 - protein, 571 aa, Streptococcus pyogenes
MSNKKTFKKYSRVAGLLTAALIIGNLVTANAESNKQNTASTETTTTNEQPKPESSELTTEKAGQKTDDMLNSNDMIKLAPKEMPLESAEKEEKKSEDKKKSEEDHTEEINDKIYSLNYNELEVLAKNGETIENFVPKEGVKKADKFIVIERKKKNINTTPVDISIIDSVTDRTYPAALQLANKGFTENKPDAVVTKRNPQKIHIDLPGMGDKATVEVNDPTYANVSTAIDNLVNQWHDNYSGGNTLPARTQYTESMVYSKSQIEAALNVNSKILDGTLGIDFKSISKGEKKVMIAAYKQIFYTVSANLPNNPADVFDKSVTFKELQRKGVSNEAPPLFVSNVAYGRTVFVKLETSSKSNDVEAAFSAALKGTDVKTNGKYSDILENSSFTAVVLGGDAAEHNKVVTKDFDVIRNVIKDNATFSRKNPAYPISYTSVFLKNNKIAGVNNRTEYVETTSTEYTSGKINLSHQGAYVAQYEILWDEINYDDKGKEVITKRRWDNNWYSKTSPFSTVIPLGANSRNIRIMAREGTGLAWEWWRKVIDERDVKLSKEINVNISGSTLSPYGSITYK

SEQ ID NO: 123 - protein, 570 aa, Streptococcus pyogenes
MSNKKTFKKYSRVAGLLTAALIIGNLVTANAESNKQNTASTETTTTNEQPKPESSELTTEKAGQKTDDMLNSNDMIKLAPKEMPLESAEKEEKKSEDKKKSEEDHTEEINDKIYSLNYNELEVLAKNGETIENFVPKEGVKKADKFIVIERKKKNINTTPVDISIIDSVTDRTYPAALQLANKGFTENKPDAVVTKRNPQKIHIDLPGMGDKATVEVNDPTYANVSTAIDNLVNQWHDNYSGGNTLPRTQYTESMVYSKSQIEAALNVNSKILDGTLGIDFKSISKGEKKVMIAAYKQIFYTVSANLPNNPADVFDKSVTFKELQRKGVSNEAPPLFVSNVAYGRTVFVKLETSSKSNDVEAAFSAALKGTDVKTNGKYSDILENSSFTAVVLGGDAAEHNKVVTKDFDVIRNVIKDNATFSRKNPAYPISYTSVFLKNNKIAGVNNRTEYVETTSTEYTSGKINLSHQGAYVAQYEILWDEINYDDKGKEVITKRRWDNNWYSKTSPFSTVIPLGANSRNIRIMARECTGLAWEWWRKVIDERDVKLSKEINVNISGSTLSPYGSITYK

SEQ ID NO: 124 - protein, 571 aa, Streptococcus pyogenes
MSNKKTFKKYSRVAGLLTAALIIGNLVTANAESNKQNTASTETTTTNEQPKPESSELTTEKAGQKTDDMLNSNDMIKLAPKEMPLESAEKEEKKSEDKKKSEEDHTEEINDKIYSLNYNELEVLAKNGETIENFVPKEGVKKADKFIVIERKKKNINTTPVDISIIDSVTDRTYPAALQLANKGFTENKPDAVVTKRNPQKIHIDLPGMGDKATVEVNDPTYANVSTAIDNLVNQWHDNYSGGNTLPARTQYTESMVYSKSQIEAALNVNSKILDGTLGIDFKSISKGEKKVMIAAYKQIFYTVSANLPNNPADVFDKSVTFKELQRKGVSNEAPPLFVSNVAYGRTVFVKLETSSKSNDVEAAFSAALKGTDVKTNGKYSDILENSSFTAVVLGGDAAEHNKVVTKDFDVIRNVIKDNATFSRKNPAYPISYTSVFLKNNKIAGVNNRTEYVETTSTEYTSGKINLSHQGAYVAQYEILWNEINYDDKGKEVITKRRWDNNWYSKTSPFSTVIPLGANSRNIRIMARECTGLAFEWWRKVIDERDVKLSKEINVNISGSTLSPYGSITYK

SEQ ID NO: 125 - protein, 543 aa, Streptococcus pyogenes
MASESNKQNTASTETTTTNEQPKPESSELTTEKAGQKTDDMLNSNDMIKLAPKEMPLESAEKEEKKSEDKKKSEEDHTEEINDKIYSLNYNELEVLAKNGETIENFVPKEGVKKADKFIVIERKKKNINTTPVDISIIDSVTDRTYPAALQLANKGFTENKPDAVVTKRNPQKIHIDLPGMGDKATVEVNDPTYANVSTAIDNLVNQWHDNYSGGNTLPARTQYTESMVYSKSQIEAALNVNSKILDGTLGIDFKSISKGEKKVMIAAYKQIFYTVSANLPNNPADVFDKSVTFKELQRKGVSNEAPPLFVSNVAYGRTVFVKLETSSKSNDVEAAFSAALKGTDVKTNGKYSDILENSSFTAVVLGGDAAEHNKVVTKDFDVIRNVIKDNATFSRKNLAYPISYTSVFLKNNKIAGVNNRTEYVETTSTEYTSGKINLSHQGAYVAQYEILWDEINYDDKGKEVITKRRWDNNWYSKTSPFSTVIPLGANSRNIRIMARECTGLAFEWWRKVIDERDVKLSKEINVNISGSTLSPYGSITYK

SEQ ID NO: 126 - protein, 543 aa, Streptococcus pyogenes
MASESNKQNTASTETTTTNEQPKPESSELTTEKAGQKTDDMLNSNDMIKLAPKEMPLESAEKEEKKSEDKKKSEEDHTEEINDKIYSLNYNELEVLAKNGETIENFVPKEGVKKADKFIVIERKKKNINTTPVDISIIDSVTDRTYPAALQLANKGFTENKPDAVVTKRNPQKIHIDLPGMGDKATVEVNDPTYANVSTAIDNLVNQWHDNYSGGNTLPARTQYTESMVYSKSQIEAALNVNSKILDGTLGIDFKSISKGEKKVMIAAYKQIFYTVSANLPNNPADVFDKSVTFKELQRKGVSNEAPPLFVSNVAYGRTVFVKLETSSKSNDVEAAFSAALKGTDVKTNGKYSDILENSSFTAVVLGGDAAEHNKVVTKDFDVIRNVIKDNATFSRKNLAYPISYTSVFLKNNKIAGVNNRTEYVETTSTEYTSGKINLSHQGAYVAQYEILWDEINYDDKGKEVITKRRWDNNWYSKTSPFSTVIPLGANSRNIRIMAREGTGLAWEWWRKVIDERDVKLSKEINVNISGSTLSPYGSITYK

SEQ ID NO: 127 - protein, 543 aa, Streptococcus pyogenes
MASESNKQNTASTETTTTNEQPKPESSELTTEKAGQKTDDMLNSNDMIKLAPKEMPLESAEKEEKKSEDKKKSEEDHTEEINDKIYSLNYNELEVLAKNGETIENFVPKEGVKKADKFIVIERKKKNINTTPVDISIIDSVTDRTYPAALQLANKGFTENKPDAVVTKRNPQKIHIDLPGMGDKATVEVNDPTYANVSTAIDNLVNQWHDNYSGGNTLPARTQYTESMVYSKSQIEAALNVNSKILDGTLGIDFKSISKGEKKVMIAAYKQIFYTVSANLPNNPADVFDKSVTFKELQRKGVSNEAPPLFVSNVAYGRTVFVKLETSSKSNDVEAAFSAALKGTDVKTNGKYSDILENSSFTAVVLGGDAAEHNKVVTKDFDVIRNVIKDNATFSRKNLAYPISYTSVFLKNNKIAGVNNRTEYVETTSTEYTSGKINLSHQGAYVAQYEILWDEINYDDKGKEVITKRRWDNNWYSKTSPFSTVIPLGANSRNIRIMAREGTGLAFEWWRKVIDERDVKLSKEINVNISGSTLSPYGSITYK

SEQ ID NO: 128 - protein, 873 aa, Streptococcus pyogenes; identical to SEQ ID NO: 56

SEQ ID NO: 129 - protein, 873 aa, Streptococcus pyogenes
MDLEQTKPNQVKQKIALTSTIALLSASVGVSHQVKADDRASGETKASNTHDDSLPKPETIQEAKATIDAVEKTLSQQKAELTELATALTKTTAEINHLKEQQDNEQKALTSAQEIYTNTLASSEETLLAQGAEHQRELTATETELHNAQADQHSKETALSEQKASISVETTRAQDLVEQVKTSEQNIAKLNAMISNPDAITKAAQTANDNTKALSSELEKAKADLENQKAKVKKQLTEELAAQKAALAEKEAELSRLKSSAPSTQDSIVGNNTMKAPQGYPLEELKKLEASGYIGSASYNNYYKEHADQIIAKASPGNQLNQYQDIPADRNRFVDPDNLTPEVQNELAQFAAHMINSVRRQLGLPPVTVTAGSQEFARLLSTSYKKTHGNTRPSFVYGQPGVSGHYGVGPHDKTIIEDSAGASGLIRNDDNMYENIGAFNDVHTVNGIKRGIYDSIKYMLFTDHLHGNTYGHAINFLRVDKHNPKAPVYLGFSTSNVGSLNEHFVMFPESNIANHQRFNKTPIKAVGSTKDYAQRVGTVSDTIAAIKGKVSSLENRLSAIHQEADIMAAQAKVSQLQGKLASTLKQSDSLNLQVRQLNDTKGSLRTELLAAKAKQAQLEATRDQSLAKLASLKAALHQTEALAEQAAARVTALVAKKAHLQYLRDFKLNPNRLQVIRERIDNTKQDLAKTTSSLLNAQEALAALQAKQSSLEATIATTEHQLTLLKTLANEKEYRHLDEDIATVPDLQVAPPLTGVKPLSYSKIDTTPLVQEMVKETKQLLEASARLAAENTSLVAEALVGQTSEMVASNAIVSKITSSITQPSSKTSYGSGSSTTSNLISDVDESTQRALKAGVVMLAAVGLTGFRFRKESR

SEQ ID NO: 130 - protein, 873 aa, Streptococcus pyogenes; identical to SEQ ID NO: 56

SEQ ID NO: 131 - protein, 107 aa, Streptococcus pyogenes
MARAALSAAPSNPRLLRVALLLLLLVAAGRRAAGASVATELRCQCLQTLQGIHPKNIQSVNVKSPGPHCAQTEVIATLKNGRKACLNPASPIVKKIIEKMLNSDKSN

SEQ ID NO: 132 - protein, 107 aa, Streptococcus pyogenes
MARATLSAAPSNPRLLRVALLLLLLVAASRRAAGAPLATELRCQCLQTLQGIHLKNIQSVKVKSPGPHCAQTEVIATLKNGQKACLNPASPMVKKIIEKMLKNGKSN

SEQ ID NO: 133 - protein, 107 aa, Streptococcus pyogenes
MAHATLSAAPSNPRLLRVALLLLLLVAASRRAAGASVVTELRCQCLQTLQGIHLKNIQSVNVRSPGPHCAQTEVIATLKNGKKACLNPASPMVQKIIEKILNKGSTN

SEQ ID NO: 134 - protein, 101 aa, Streptococcus pyogenes
  VARIANT (1)...(105): Xaa = Any Amino Acid
MSSAAGFCASRPGLLFLGLLLLPLVVAFASAEAEEDGDLQCLCVKTTSQVRPRHITSLEVIKAGPHCPTAQLIATLKNGRKICLDLQAPLYKKIIKKLLES

SEQ ID NO: 135 - protein, 89 aa, Streptococcus pyogenes
MNAKVVVVLVLVLTALCLSDGKPVSLSYRCPCRFFESHVARANVKHLKILNTPNCALQIVARLKNNNRQVCIDPKLKWIQEYLEKALNK

SEQ ID NO: 136 - protein, 93 aa, Streptococcus pyogenes
MNAKVVVVLVLVLTALCLSDGKPVSLSYRCPCRFFESHVARANVKHLKILNTPNCALQIVARLKNNNRQVCIDPKLKWIQEYLEKALNKRFKM

SEQ ID NO: 137 - protein, 119 aa, Streptococcus pyogenes
MNAKVVVVLVLVLTALCLSDGKPVSLSYRCPCRFFESHVARANVKHLKILNTPNCALQIVARLKNNNRQVCIDPKLKWIQEYLEKALNKGRREEKVGKKEKIGKKKRQKKRKAAQKRKN

SEQ ID NO: 138 - protein, 114 aa, Streptococcus pyogenes
MSLLSSRAARVPGPSSSLCALLVLLLLLTQPGPIASAGPAAAVLRELRCVCLQTTQGVHPKMISNLQVFAIGPQCSKVEVVASLKNGKEICLDPEAPFLKKVIQKILDGGNKEN

SEQ ID NO: 139 - protein, 114 aa, Streptococcus pyogenes
MSLPSSRAARVPGPSGSLCALLALLLLLTPPGPLASAGPVSAVLTELRCTCLRVTLRVNPKTIGKLQVFPAGPQCSKVEVVASLKNGKQVCLDPEAPFLKKVIQKILDSGNKKN

SEQ ID NO: 140 - protein, 128 aa, Streptococcus pyogenes
MSLRLDTTPSCNSARPLHALQVLLLLSLLLTALASSTKGQTKRNLAKGKEESLDSDLYAELRCMCIKTTSGIHPKNIQSLEVIGKGTHCNQVEVIATLKDGRKICLDPDAPRIKKIVQKKLAGDESAD

SEQ ID NO: 141 - protein, 125 aa, Streptococcus pyogenes
MKKSGVLFLLGIILLVLIGVQGTPVVRKGRCSCISTNQGTIHLQSLKDLKQFAPSPSCEKIEIIATLKNGVQTCLNPDSADVKELIKKWEKQVSQKKKQKNGKKHQKKKVLKVRKSQRSRQKKTT

SEQ ID NO: 142 - protein, 98 aa, Streptococcus pyogenes
MNQTAILICCLIFLTLSGIQGVPLSRTVRCTCISISNQPVNPRSLEKLEIIPASQFCPRVEIIATMKKKGEKRCLNPESKAIKNLLKAVSKERSKRSP

SEQ ID NO: 143 - protein, 94 aa, Streptococcus pyogenes
MSVKGMAIALAVILCATVVQGFPMFKRGRCLCIGPGVKAVKVADIEKASIMYPSNNCDKIEVIITLKENKGQRCLNPKSKQARLIIKKVERKNF

SEQ ID NO: 144 - protein, 109 aa, Streptococcus pyogenes
MKFISTSLLLMLLVSSLSPVQGVLEVYYTSLRCRCVQESSVFIPRRFIDRIQILPRGNGCPRKEIIVWKKNKSIVCVDPQAEWIQRMMEVLRKRSSSTLPVPVFKRKIP

SEQ ID NO: 145 - protein, 99 aa, Streptococcus pyogenes
MRLLAAALLLLLLALYTARVDGSKCKCSRKGPKIRYSDVKKLEMKPKYPHCEEKMVIITTKSVSRYRGQEHCLHPKLQSTKRFIKWYNAWNEKRRVYEE

SEQ ID NO: 146 - protein, 254 aa, Streptococcus pyogenes
MGRDLRPGSRVLLLLLLLLLVYLTQPGNGNEGSVTGSCYCGKRISSDSPPSVQFMNRLRKHLRAYHRCLYYTRFQLLSWSVCGGNKDPWVQELMSCLDLKECGHAYSGIVAHQKHLLPTSPPISQASEGASSDIHTPAQMLLSTLQSTQRPTLPVGSLSSDKELTRPNETTIHTAGHSLAAGPEAGENQKQPEKNAGPTARTSATVPVLCLLAIIFILTAALSYVLCKRRRGQSPQSSPDLPVHYIPVAPDSNT

SEQ ID NO: 147 - protein, 1580 aa, Streptococcus pyogenes
ADELSTMSEPTITNHAQQQAQHLTNTELSSAESKSQDTSQITLKTNREKEQSQDLVSEPTTTELADTDAASMANTGSDATQKSASLPPVNTDVHDWVKTKGAWDKGYKGQGKVVAVIATGIDPAHQSMRISDVSTAKVKSKEDMLARQKAAGINYGSWINDKVVFAHNYVENSDNIKENQFEDFDEDWENFEFDAEAEPKAIKKHKIYRPQSTQAPKETVIKTEETDGSHDIDWTQTDDDTKYESHGMHVTGIVAGNSKEAAATGERFLGIAPEAQVMFMRVFANDIMGSAESLFIKAIEDAVALGADVINLSLGTANGAQLSGSKPLMEAIEKAKKAGVSVVVAAGNERVYGSDHDDPLATNPDYGLVGSPSTGRTPTSVAAINSKWVIQRLMTVKELENRADLNHGKAIYSESVDFKDIKDSLGYDKSHQFAYVKESTDAGYNAQDVKGKIALIERDPNKTYDEMIALAKKHGALGVLIFNNKPGQSNRSMRLTANGMGIPSAFISHEFGKAMSQLNGNGTGSLEFDSVVSKAPSQKGNEMNHFSNWGLTSDGYLKPDITAPGGDIYSTYNDNHYGSQTGTSMASPQIAGASLLVKQYLEKTQPNLPKEKIADIVKNLLMSNAQIHVNPETKTTTSPRQQGAGLLNIDGAVTSGLYVTGKDNYGSISLGNITDTMTFDVTVHNLSNKDKTLRYDTELLTDHVDPQKGRFTLTSHSLKTYQGGEVTVPANGKVTVRVTMDVSQFTKELTKQMPNGYYLEGFVRFRDSQDDQLNRVNIPFVGFKGQFENLAVAEESIYRLKSQGKTGFYFDESGPKDDIYVGKHFTGLVTLGSETNVSTKTISDNGLHTLGTFKNADGKFILEKNAQGNPVLAISPNGDNNQDFAAFKGVFLRKYQGLKASVYHASDKEHKNPLWVSPESFKGDKNFNSDIRFAKSTTLLGTAFSGKSLTGAELPDGHYHYVVSYYPDVVGAKRQEMTFDMILDRQKPVLSQATFDPETNRFKPEPLKDRGLAGVRKDSVFYLERKDNKPYTVTINDSYKYVSVEDNKTFVERQADGSFILPLDKAKLGDFYYMVEDFAGNVAIAKLGDHLPQTLGKTPIKLKLTDGNYQTKETLKDNLEMTQSDTGLVTNQAQLAVVHRNQPQSQLTKMNQDFFISPNEDGNKDFVAFKGLKNNVYNDLTVNVYAKDDHQKQTPIWSSQAGASVSAIESTAWYGITARGSKVMPGDYQYVVTYRDEHGKEHQKQYTISVNDKKPMITQGRFDTINGVDHFTPDKTKALDSSGIVREEVFYLAKKNGRKFDVTEGKDGITVSDNKVYIPKNPDGSYTISKRDGVTLSDYYYLVEDRAGNVSFATLRDLKAVGKDKAVVNFGLDLPVPEDKQIVNFTYLVRDADGKPIENLEYYNNSGNSLILPYGKYTVELLTYDTNAAKLESDKIVSFTLSADNNFQQVTFKITMLATSQITAHFDHLLPEGSRVSLKTAQDQLIPLEQSLYVPKAYGKTVQEGTYEVVVSLPKGYRIEGNTKVNTLPNEVHELSLRLVKVGDASDSTGDHKVMSKNNSQALTASATPTKSTTSATAKA

SEQ ID NO: 148 - protein, 1580 aa, Streptococcus pyogenes
ADELSTMSEPTITNHAQQQAQHLTNTELSSAESKSQDTSQITLKTNREKEQSQDLVSEPTTTELADTDAASMANTGSDATQKSASLPPVNTDVHDWVKTKGAWDKGYKGQGKVVAVIDTGIDPAHQSMRISDVSTAKVKSKEDMLARQKAAGINYGSWINDKVVFAHNYVENSDNIKENQFEDFDEDWENFEFDAEAEPKAIKKHKIYRPQSTQAPKETVIKTEETDGSHDIDWTQTDDDTKYESHGMHVTGIVAGNSKEAAATGERFLGIAPEAQVMFMRVFANDIMGSAESLFIKAIEDAVALGADVINLSLGTANGAQLSGSKPLMEAIEKAKKAGVSVVVAAGNERVYGSDHDDPLATNPDYGLVGSPSTGRTPTSVAAINSKWVIQRLMTVKELENRADLNHGKAIYSESVDFKDIKDSLGYDKSHQFAYVKESTDAGYNAQDVKGKIALIERDPNKTYDEMIALAKKHGALGVLIFNNKPGQSNRSMRLTANGMGIPSAFISHEFGKAMSQLNGNGTGSLEFDSVVSKAPSQKGNEMNHFSNWGLTSDGYLKPDITAPGGDIYSTYNDNHYGSQTGTAMASPQIAGASLLVKQYLEKTQPNLPKEKIADIVKNLLMSNAQIHVNPETKTTTSPRQQGAGLLNIDGAVTSGLYVTGKDNYGSISLGNITDTMTFDVTVHNLSNKDKTLRYDTELLTDHVDPQKGRFTLTSHSLKTYQGGEVTVPANGKVTVRVTMDVSQFTKELTKQMPNGYYLEGFVRFRDSQDDQLNRVNIPFVGFKGQFENLAVAEESIYRLKSQGKTGFYFDESGPKDDIYVGKHFTGLVTLGSETNVSTKTISDNGLHTLGTFKNADGKFILEKNAQGNPVLAISPNGDNNQDFAAFKGVFLRKYQGLKASVYHASDKEHKNPLWVSPESFKGDKNFNSDIRFAKSTTLLGTAFSGKSLTGAELPDGHYHYVVSYYPDVVGAKRQEMTFDMILDRQKPVLSQATFDPETNRFKPEPLKDRGLAGVRKDSVFYLERKDNKPYTVTINDSYKYVSVEDNKTFVERQADGSFILPLDKAKLGDFYYMVEDFAGNVAIAKLGDHLPQTLGKTPIKLKLTDGNYQTKETLKDNLEMTQSDTGLVTNQAQLAVVHRNQPQSQLTKMNQDFFISPNEDGNKDFVAFKGLKNNVYNDLTVNVYAKDDHQKQTPIWSSQAGASVSAIESTAWYGITARGSKVMPGDYQYVVTYRDEHGKEHQKQYTISVNDKKPMITQGRFDTINGVDHFTPDKTKALDSSGIVREEVFYLAKKNGRKFDVTEGKDGITVSDNKVYIPKNPDGSYTISKRDGVTLSDYYYLVEDRAGNVSFATLRDLKAVGKDKAVVNFGLDLPVPEDKQIVNFTYLVRDADGKPIENLEYYNNSGNSLILPYGKYTVELLTYDTNAAKLESDKIVSFTLSADNNFQQVTFKITMLATSQITAHFDHLLPEGSRVSLKTAQDQLIPLEQSLYVPKAYGKTVQEGTYEVVVSLPKGYRIEGNTKVNTLPNEVHELSLRLVKVGDASDSTGDHKVMSKNNSQALTASATPTKSTTSATAKA

SEQ ID NO: 149 - protein, 1580 aa, Streptococcus pyogenes
ADELSTMSEPTITNHAQQQAQHLTNTELSSAESKSQDTSQITLKTNREKEQSQDLVSEPTTTELADTDAASMANTGSDATQKSASLPPVNTDVHDWVKTKGAWDKGYKGQGKVVAVIATGIDPAHQSMRISDVSTAKVKSKEDMLARQKAAGINYGSWINDKVVFAHNYVENSDNIKENQFEDFDEDWENFEFDAEAEPKAIKKHKIYRPQSTQAPKETVIKTEETDGSHDIDWTQTDDDTKYESHGMHVTGIVAGNSKEAAATGERFLGIAPEAQVMFMRVFANDIMGSAESLFIKAIEDAVALGADVINLSLGTANGAQLSGSKPLMEAIEKAKKAGVSVVVAAGNERVYGSDHDDPLATNPDYGLVGSPSTGRTPTSVAAINSKWVIQRLMTVKELENRADLNHGKAIYSESVDFKDIKDSLGYDKSHQFAYVKESTDAGYNAQDVKGKIALIERDPNKTYDEMIALAKKHGALGVLIFNNKPGQSNRSMRLTANGMGIPSAFISHEFGKAMSQLNGNGTGSLEFDSVVSKAPSQKGNEMNHFSNWGLTSDGYLKPDITAPGGDIYSTYNDNHYGSQTGTAMASPQIAGASLLVKQYLEKTQPNLPKEKIADIVKNLLMSNAQIHVNPETKTTTSPRQQGAGLLNIDGAVTSGLYVTGKDNYGSISLGNITDTMTFDVTVHNLSNKDKTLRYDTELLTDHVDPQKGRFTLTSHSLKTYQGGEVTVPANGKVTVRVTMDVSQFTKELTKQMPNGYYLEGFVRFRDSQDDQLNRVNIPFVGFKGQFENLAVAEESIYRLKSQGKTGFYFDESGPKDDIYVGKHFTGLVTLGSETNVSTKTISDNGLHTLGTFKNADGKFILEKNAQGNPVLAISPNGDNNQDFAAFKGVFLRKYQGLKASVYHASDKEHKNPLWVSPESFKGDKNFNSDIRFAKSTTLLGTAFSGKSLTGAELPDGHYHYVVSYYPDVVGAKRQEMTFDMILDRQKPVLSQATFDPETNRFKPEPLKDRGLAGVRKDSVFYLERKDNKPYTVTINDSYKYVSVEDNKTFVERQADGSFILPLDKAKLGDFYYMVEDFAGNVAIAKLGDHLPQTLGKTPIKLKLTDGNYQTKETLKDNLEMTQSDTGLVTNQAQLAVVHRNQPQSQLTKMNQDFFISPNEDGNKDFVAFKGLKNNVYNDLTVNVYAKDDHQKQTPIWSSQAGASVSAIESTAWYGITARGSKVMPGDYQYVVTYRDEHGKEHQKQYTISVNDKKPMITQGRFDTINGVDHFTPDKTKALDSSGIVREEVFYLAKKNGRKFDVTEGKDGITVSDNKVYIPKNPDGSYTISKRDGVTLSDYYYLVEDRAGNVSFATLRDLKAVGKDKAVVNFGLDLPVPEDKQIVNFTYLVRDADGKPIENLEYYNNSGNSLILPYGKYTVELLTYDTNAAKLESDKIVSFTLSADNNFQQVTFKITMLATSQITAHFDHLLPEGSRVSLKTAQDQLIPLEQSLYVPKAYGKTVQEGTYEVVVSLPKGYRIEGNTKVNTLPNEVHELSLRLVKVGDASDSTGDHKVMSKNNSQALTASATPTKSTTSATAKA

SEQ ID NO: 150 - DNA, 28 bp, Streptococcus pyogenes
gtgcgtcatatggcagatgagctaagca

SEQ ID NO: 151 - DNA, 21 bp, Streptococcus pyogenes
ccctgtggcaataactgcgac

SEQ ID NO: 152 - DNA, 21 bp, Streptococcus pyogenes
cgcagttattgccacagggat

SEQ ID NO: 153 - DNA, 30 bp, Streptococcus pyogenes
ctgactgagtcgacagactctgaatagatg

SEQ ID NO: 154 - DNA, 34 bp, Streptococcus pyogenes
ctgactgagtcgactttaaagacataaaagatag

SEQ ID NO: 155 - DNA, 21 bp, Streptococcus pyogenes
gagaggccatagctgttcctg

SEQ ID NO: 156 - DNA, 21 bp, Streptococcus pyogenes
ggaacagctatggcctctcct

SEQ ID NO: 157 - DNA, 35 bp, Streptococcus pyogenes
gtgcgtgctagcgaatcgaacaaacaaaacactgc

SEQ ID NO: 158 - DNA, 42 bp, Streptococcus pyogenes
gcattcgatcctcgagctacttataagtaatcgaaccatatg

SEQ ID NO: 159 - DNA, 45 bp, Streptococcus pyogenes
gctaccttcagtagaaaaaacctagcttatcctatttcatacacc

SEQ ID NO: 160 - DNA, 45 bp, Streptococcus pyogenes
ggtgtatgaaataggataagctaggttttttctactgaaggtagc

SEQ ID NO: 161 - DNA, 41 bp, Streptococcus pyogenes
gcattcgatcctcgagcttataagtaatcgaaccatatggg

SEQ ID NO: 162 - DNA, 42 bp, Streptococcus pyogenes
gagtgcactggcttagctttcgaatggtggcgaaaagtgatc

SEQ ID NO: 163 - DNA, 42 bp, Streptococcus pyogenes
gatcacttttcgccaccattcgaaagctaagccagtgcactc

SEQ ID NO: 164 - DNA, 55 bp, Streptococcus pyogenes
gttgctcaatatgaaatcctttggaatgaaatcaattatgatgacaaaggaaaag

SEQ ID NO: 165 - DNA, 55 bp, Streptococcus pyogenes
cttttcctttgtcatcataattgatttcattccaaaggatttcatattgagcaac

SEQ ID NO: 166 - DNA, 42 bp, Streptococcus pyogenes
ccgtatcatggctagagagggcactggcttagcttgggaatg

SEQ ID NO: 167 - DNA, 42 bp, Streptococcus pyogenes
cattcccaagctaagccagtgccctctctagccatgatacgg

SEQ ID NO: 168 - DNA, 30 bp, Streptococcus pyogenes
gtgcgtgctagcgaatcgaacaaacaaaac

SEQ ID NO: 169 - DNA, 34 bp, Streptococcus pyogenes
gcgtctcgagtcacttataagtaatcgaaccata

SEQ ID NO: 170 - DNA, 42 bp, Streptococcus pyogenes
ccgtatcatggctagagagggcactggcttagctttcgaatg

SEQ ID NO: 171 - DNA, 42 bp, Streptococcus pyogenes
cattcgaaagctaagccagtgccctctctagccatgatacgg

SEQ ID NO: 172 - DNA, 45 bp, Streptococcus pyogenes
ctggtggtaatacgcttcctagaacacaatatactgaatcaatgg

SEQ ID NO: 173 - DNA, 45 bp, Streptococcus pyogenes
ccattgattcagtatattgtgttctaggaagcgtattaccaccag

SEQ ID NO: 174 - protein, 26 aa, Streptococcus pyogenes
QNTASTETTTTNEQPKPESSELTTEK

SEQ ID NO: 175 - protein, 18 aa, Streptococcus pyogenes
NINTTPVDISIIDSVTDR

SEQ ID NO: 176 - protein, 11 aa, Streptococcus pyogenes
TEYVETTSTEY

SEQ ID NO: 177 - protein, 824 aa, S. pyogenes
MSVGVSHQVKADDRASGETKASNTHDDSLPKPETIQEAKATIDAVEKTLSQQKAELTELATALTKTTAEINHLKEQQDNEQKALTSAQEIYTNTLASSEETLLAQGAEHQRELTATETELHNAQADQHSKETALSEQKASISAETTRAQDLVEQVKTSEQNIAKLNAMISNPDAITKAAQTANDNTKALSSELEKAKADLENQKAKVKKQLTEELAAQKAALAEKEAELSRLKSSAPSTQDSIVGNNTMKAPQGYPLEELKKLEASGYIGSASYNNYYKEHADQIIAKASPGNQLNQYQDIPADRNRFVDPDNLTPEVQNELAQFAAHMINSVRRQLGLPPVTVTAGSQEFARLLSTSYKKTHGNTRPSFVYGQPGVSGHYGVGPHDKTIIEDSAGASGLIRNDDNMYENIGAFNDVHTVNGIKRGIYDSIKYMLFTDHLHGNTYGHAINFLRVDKHNPNAPVYLGFSTSNVGSLNEHFVMFPESNIANHQRFNKTPIKAVGSTKDYAQRVGTVSDTIAAIKGKVSSLENRLSAIHQEADIMAAQAKVSQLQGKLASTLKQSDSLNLQVRQLNDTKGSLRTELLAAKAKQAQLEATRDQSLAKLASLKAALHQTEALAEQAAARVTALVAKKAHLQYLRDFKLNPNRLQVIRERIDNTKQDLAKTTSSLLNAQEALAALQAKQSSLEATIATTEHQLTLLKTLANEKEYRHLDEDIATVPDLQVAPPLTGVKPLSYSKIDTTPLVQEMVKETKQLLEASARLAAENTSLVAEALVGQTSEMVASNAIVSKITSSITQPSSKTSYGSGSSTTSNLISDVDESTQR

SEQ ID NO: 178 - protein, 398 aa, S. pyogenes
MKKRILSAVLVSGVTLGAATTVGAEDLSTKIAKQDSIISNLTTEQKAAQNQVSALQAQVSSLQSEQDKLTARNTELEALSKRFEQEIKALTSQIVARNEKLKNQARSAYKNNETSGYINALLNSKSISDVVNRLVAINRAVSANAKLLEQQKADKVSLEEKQAANQTAINTIAANMAMAEENQNTLRTQQANLVAATANLALQLASATEDKANLVAQKEAAEKAAAEALAQEQAAKVKAQEQAAQQAASVEAAKSAITPAPQATPAAQSSNAIEPAALTAPAAPSAGPQTSYDSSNTYPVGQCTWGAKSLAPWAGNNWGNGGQWAYSAQAAGYRTGSTPMVGAIAVWNDGGYGHVAVVVEVQSASSIRVMESNYSGRQYIADHRGWFNPTGVTFIYPH

SEQ ID NO: 179 - protein, 342 aa, S. pyogenes
MSLGLVSTALFTLGGCTNNSAKQTTDNSLKIAMITNQTGIDDKSFNQSAWEGLQAWGKENKLEKGKGYDYFQSANESEFTTNLESAVTNGYNLVFGIGFPLHDAVEKVAANNPDNHFAIVDDVIKGQKNVASITFSDHEAAYLAGVAAAKTTKTKQVGFVGGMEGDVVKRFEKGFEAGVKSVDDTIKVRVAYAGSFADAAKGKTIAAAQYAEGADVIYHAAGGTGAGVFSEAKSINEKRKEEDKVWVIGVDRDQSEDGKYTTKDGKSANFVLTSSIKEVGKALVKVAVKTSEDQFPGGQITTFGLKEGGVSLTTDALTQDTKKAIEAAKKAIIEGTITVPEN

SEQ ID NO: 180 - protein, 310 aa, S. pyogenes
MKKLTLLLTLCLTTITLIACGNQATNHSNTASKSLSPMPQIAGVTYYGDIPKQPKRVVSLASTYTGYLKKLDMNLVGVTSYDKKNPILAKTVKKAKQVAATDLEAVTTLKPDLIVVGSTEENIKQLAEIAPVISIEYRKRDYLQVLSDFGRIFNKEDKAKKWLKDWKTKTAAYEKEVKAVTGDKATFTIMGLYEKDVYLFGKDWGRGGEIIHQAFHYDAPEKVKTEVFKQGYLSLSQEVLPDYIGDYVVVAAEDDKTGSALYESKLWQSIPAVKKHHVIKVNANVFYFTDPLSLEYQLETLREAILSSEN

SEQ ID NO: 181 - protein, 515 aa, S. pyogenes
MKKKILLMMSLISVFFAWQLTQAKQVLAEGKVKVVTTFYPVYEFTKGVIGNDGDVFMLMKAGTEPHDFEPSTKDIKKIQDADAFVYMDDNMETWVSDVKKSLTSKKVTIVKGTGNMLLVAGAGHDHPHEDADKKHEHNKHSEEGHNHAFDPHVWLSPYRSITVVENIRDSLSKAYPEKAENFKANAATYIEKLKELDKDYTAALSDAKQKSFVTQHAAFGYMALDYGLNQISINGVTPDAEPSAKRIATLSKYVKKYGIKYIYFEENASSKVAKTLAKEAGVKAAVLSPLEGLTEKEMKAGQDYFTVMRKNLETLRLTTDVAGKEILPEKDTTKTVYNGYFKDKEVKDRQLSDWSGSWQSVYPYLQDGTLDQVWDYKAKKSKGKMTAAEYKDYYTTGYKTDVEQIKINGKKKTMTFVRNGEKKTFTYTYAGKEILTYPKGNRGVRFMFEAKEADAGEFKYVQFSDHAIAPEKAKHFHLYWGGDSQEKLHKELEHWPTYYGSDLSGREIAQEINAH

SEQ ID NO: 182 - protein, 2045 aa, S. pyogenes
MRKVKKVFVSSCMLLTVGLGVAVPTGFSQSNGVMVVKAAEVPATDLSRQASDSERVDESSLLQKENLSVDSFKLENLNGWEAENDTAGNLGKFKDPDSSGYQNILTSSGKNISVAVAPKGSGKMNIKVTKRSNFQGGYYVGGLRTQTPVLKLNDVYRYSFTTKKLSGNSSEFKTRVKPVESNNKLGKELVIRVDNKNVSTKHDWLPDISDGTHTVDFTGLDKKLSVAFRFSPRQTSNVVYEFSNINIKNISPASVPAIPSKVLEGTSVLSGTAISSGDTLEKRKSFDGDILRVYKDSKIIARTVIKGNKWDVKLSKPLIAGEKLDFEILHPRSQNVSKKISKQVEAKPFDPASYKEKVIAKLKPVYEATSEKITNDAWLDENAKDLQKQKLEEQYISGKVAISEAGTKQEAIDAAYNKYSSQTDPDSLPSQYKQGNKENEQEKGRQDLIQTRDLTLKAIQEDKWLTEQEKTIQKEEALKAFETGIESVNQTVSLEQLKQRLIVYKASEKDSEKKEYPESIPNQHIPGKEKEVKAAKQEELKKLHDTTLEKINQDKWLTPDQQAEQLKQAEVTFKKGQEAIKSAQTLTQLETDLADYVSENEGKGNSIPDKYKSGNKDDLVNKAEVKLKEAHEATKQAIEKDPWLSPEQKKAQKEKAKARLDEGLKALKAADSLEILKVTEEAFVDKEKNPDSIPNQHKAGTADQARKQALDSLDKEVQKELESIDNDNTLTTDEKAAAKKKVNDAYDVAKQTAMEANSYEDLTTIKDEFLSNLPHKQGTPLKDQQSDAIAELEKKQQEIEKAIEGDKTLPRDEKEKQIADSKERLKSDTQKVKDAKNADAIKKAFEEGKVNIPQAHIPGDLNKDKEKLLAELKQKADDTEKAIDVDKTLTEDEKKEQKVKTKAELEKAKTDVKNTQTREELDKKVPELKKAIEDTHVKGNLEGVKNKAIEDLKKAHTETVAKINGDDTLDKATKEAQVKEADKALAAGKDAITKADDADKVSTAVTEHTPKIKAAHKTGDLKKAQVDANTALDKAAEKERGEINKDATLTTEDKAKQLKEVETALTKAKDNVKAAKTADAINDARDKGVATIDAVHKAGQDLGARKSGQVAKLEEAAKATKDKISADPTLTSKEKEEQSKAVDAELKKAIEAVNAADTADKVDDALGEGVTDIKNQHKSGDSIDARREAHGKELDRVAQETKGAIEKDPTLTTEEKAKQVKDVDAAKERGMAKLNEAKDADALDKAYGEGVTDIKNQHKSGDPVDARRGLHNKSIDEVAQATKDAITADTTLTEAEKETQRGNVDKEATKAKEELAKAKDADALDKAYGDGVTSIKNQHKSGKGLDVRKDEHKKALEAVAKRVTAEIEADPTLTPEVREQQKAEVQKELELATDKIAEAKDADEADKAYGDGVTAIENAHVIGKGIEARKDLAKKDLAEAAAKTKALIIEDKTLTDDQRKEQLLGVDTEYAKGIENIDAAKDAAGVDKAYSDGVRDILAQYKEGQNLNDRRNAAKEFLLKEADKVTKLINDDPTLTHDQKVDQINKVEQAKLDAIKSVDDAQTADAINDALGKGIENINNQYQHGDGVDVRKATAKGDLEKEAAKVKALIAKDPTLTQADKDKQTAAVDAAKNTAIAAVDKATTTEGINQELGKGITAINKAYRPGEGVKARKEAAKADLEKEAAKVKALITNDPTLTKADKAKQTEAVAKALKAAIAAVDKATTAEGINQELGKGITAINKAYRPGEGVKARKEAAKADLEREAAKVREAIANDPTLTKADKAKQTEAVAKALKAAIAAVDKATTAEGINQELGKGITAINKAYRPGEGVEAHKEAAKANLEKVAKETKALISGDRYLSETEKAVQKQAVEQALAKALGQVEAAKTVEAVKLAENLGTVAIRSAYVAGLAKDTDQATAALNEAKQAAIEALKQAAAETLAKITTDAKLTEAQKAEQSENVSLALKTAIATVRSAQSIASVKEAKDKGITAIRAAYVPNKAVAKSSSANHLPKSGDANSIVLVGLGVMSLLLGMVLYSKKKESKD

SEQ ID NO: 183 - protein, 278 aa, S. pyogenes
MIIKKRTVAILAIASSFFLVACQATKSLKSGDAWGVYQKQKSITVGFDNTFVPMGYKDESGRCKGFDIDLAKEVFHQYGLKVNFQAINWDMKEAELNNGKIDVIWNGYSITKERQDKVAFTDSYMRNEQIIVVKKRSDIKTISDMKHKVLGAQSASSGYDSLLRTPKLLKDFIKNKDANQYETFTQAFIDLKSDRIDGILIDKVYANYYLAKEGQLENYRMIPTTFENEAFSVGLRKEDKTLQAKINRAFRVLYQNGKFQAISEKWFGDDVATANIKS

SEQ ID NO: 184 - protein, 792 aa, S. pyogenes
MKTKKVIILVGLLLSSQLTLIACQSRGNGTYPIKTKQSRKGMTSNKIKPIKKSKKTNKTHKGVAGVDFPTDDGFILTKDSKILSKTDQGIVVDHDGHSHFIFYADLKGSPFEYLIPKGASLAKPAVAQRAASQGTSKVADPHHHYEFNPADIVAEDALGYTVRHDDHFHYILKSSLSGQTQAQAKQVATRLPQTSSLVSTATANGIPGLHFPTSDGFQFNGQGIVGVTKDSILVDHDGHLHPISFADLRQGGWAHVADQYDPAKKAEKPAETHQTPELSEREKEYQEKLAYLAEKLGIDPSTIKRVETQDGKLGLEYPHHDHAHVLMLSDIEIGKDIPDPHAIEHARELEKHKVGMDTLRALGFDEEVILDIVRTHDAPTPFPSNEKDPNMMKEWLATVIKLDLGSRKDPLQRKGLSLLPNLETLGIGFTPIKDISPVLQFKKLKQLLMTKTGVTDYRFLDNMPQLEGIDISQNNLKDISFLSKYKNLTLVAAADNGIEDIRPLGQLPNLKFLVLSNNKISDLSPLASLHQLQELHIDNNQITDLSPVSHKESLTVVDLSRNADVDLATLQAPKLETLMVNDTKVSHLDFLKNNPNLSSLSINRAQLQSLEGIEASSVIVRVEAEGNQIKSLVLKDKQGSLTFLDVTGNQLTSLEGVNNFTALDILSVSKNQLTNVNLSKPNKTVTNIDISHNNISLADLKLNEQHIPEAIAKNFPAVYEGSMVGNGTAEEKAAMATKAKESAQEASESHDYNHNHTYEDEEGHAHEHRDKDDHDHEHEDENEAKDEQNHAD

SEQ ID NO: 185 - protein, 351 aa, S. pyogenes
MKNSNKLIASVVTLASVMALAACQSTNDNTKVISMKGDTISVSDFYNETKNTEVSQKAMLNLVISRVFEAQYGDKVSKKEVEKAYHKTAEQYGASFSAALAQSSLTPETFKRQIRSSKLVEYAVKEAAKKELTTQEYKKAYESYTPTMAVEMITLDNEETAKSVLEELKAEGADFTAIAKEKTTTPEKKVTYKFDSGATNVPTDVVKAASSLNEGGISDVISVLDPTSYQKKFYIVKVTKKAEKKSDWQEYKKRLKAIIIAEKSKDMNFQNKVIANALDKANVKIKDKAFANILAQYANLGQKTKAASESSTTSESSKAAEENPSESEQTQTSSAEEPTETEAQTQEPAAQ

SEQ ID NO: 186 - protein, 424 aa, S. pyogenes
MKIGKKIVLMFTAIVLTTVLALGVYLTSAYTFSTGELSKTFKDFSTSSNKSDAIKQTRAFSILLMGVDTGSSERASKWEGNSDSMILVTVNPKTKKTTMTSLERDTLTTLSGPKNNEMNGVEAKLNAAYAAGGAQMAIMTVQDLLNITIDNYVQINMQGLIDLVNAVGGITVTNEFDFPISIAENEPEYQATVAPGTHKINGEQALVYARMRYDDPEGDYGRQKRQREVIQKVLKKILALDSISSYRKILSAVSSNMQTNIEISSRTIPSLLGYRDALRTIKTYQLKGEDATLSDGGSYQIVTSNHLLEIQNRIRTELGLHKVNQLKTNATVYENLYGSTKSQTVNNNYDSSGQAPSYSDSHSSYANYSSGVDTGQSASTDQDSTASSHRPATPSSSSDALAADESSSSGSGSLVPPANINPQT

SEQ ID NO: 187 - protein, 284 aa, S. pyogenes
MKSKKVVSVISLTLSLFLVTGCAKVDNNKSVNLKPATKQTYNSYSDDQLRSRENTMSVLWYQRAAETQALYLQGYQLATDRLKEQLNKPTDKPYSIVLDIDETVLDNSPYQAKNVLEGTGFTPESWDYWVQKKEAKPVAGAKDFLQFADQNGVQIYYISDRSTTQVDATMENLQKEGIPVQGRDHLLFLEKGVKSKESRRQKVKETTNVTMLFGDNLLDFADFSKKSQEDRTALLSDLQEEFGRRFIIFPNPMYGSWEGAIYKGEKLDVLKQLEERRKSLKSFK

SEQ ID NO: 188 - protein, 440 aa, S. pyogenes
MKNYLSIGVIALLFALTFGTVKSVQAIAGYGWLPDRPPINNSQLVVSMAGIVEGTDKKVFINFFEIDLTSQPAHGGKTEQGLSPKSKPFATDNGAMPHKLEKADLLKAIQKQLIANVHSNDGYFEVIDFASDATITDRNGKVYFADKDGSVTLPTQPVQEFLLKGHVRVRPYKEKPVQNQAKSVDVEYTVQFTPLNPDDDFRPGLKDTKLLKTLAIGDTITSQELLAQAQSILNKTHPGYTIYERDSSIVTHDNDIFRTILPMDQEFTYHVKNREQAYEINPKTGIKEKTNNTDLVSEKYYVLKQGEKPYDPFDRSHLKLFTIKYVDVNTNELLKSEQLLTASERNLDFRDLYDPRDKAKLLYNNLDAFDIMDYTLTGKVEDNHDKNNRVVTVYMGKRPKGAKGSYHLAYDKDLYTEEERKAYSYLRDTGTPIPDNPKDK

SEQ ID NO: 189 - protein, 542 aa, S. pyogenes
MSKYLKYFSIITLFLTGLILVACQQQKPQTKERQRKQRPKDELVVSMGAKLPHEFDPKDRYGVHNEGNITHSTLLKRSPELDIKGELAKTYHLSEDGLTWSFDLHDDFKFSNGEPVTADDVKFTYDMLKADGKAWDLTFIKNVEVVGKNQVNIHLTEAHSTFTAQLTEIPIVPKKHYNDKYKSNPIGSGPYMVKEYKAGEQAIFVRNPYWHGKKPYFKKWTWVLLDENTALAALESGDVDMIYATPELADKKVKGTRLLDIPSNDVRGLSLPYVKKGVITDSPDGYPVGNDVTSDPAIRKALTIGLNRQKVLDTVLNGYGKPAYSIIDKTPFWNPKTAIKDNKVAKAKQLLTKAGWKEQADGSRKKGDLDAAFDLYYPTNDQLRANLAVEVAEQAKALGITIKLKASNWDEMATKSHDSALLYAGGRHHAQQFYESHHPSLAGKGWTNITFYNNPTVTKYLDKAMTSSDLDKANEYWKLAQWDGKTGASTLGDLPNVWLVSLNHTYIGDKRINVGKQGVHSHGHDWSLLTNIAEWTWDESTK

SEQ ID NO: 190 - protein, 308 aa, S. pyogenes
MNIRNKIENSKTLLFTSLVAVALLGATQPVSAETYTSRNFDWSGDDWSGDDWPEDDWSGDGLSKYDRSGVGLSQYGWSKYGWSSDKEEWPEDWPEDDWSSDKKDETEDKTRPPYGEALGTGYEKRDDWGGPGTVATDPYTPPYGGALGTGYEKRDDWGGPGTVATDPYTPPYGGALGTGYEKRDDWRGPGHIPKPENEQSPNPLHIPEPPQIEWPQWNGFDGLSFGPSDWGQSEDTPPSEPRVPEKPQHTPQKNPQESDFDRGFSAGLKAKNSGRGIDFEGFQYGGWSDEYKKGYMQAFGTPYTPSAT

SEQ ID NO: 191 - protein, 428 aa, S. pyogenes
MSHMKKRPEVLSPAGTLEKLKVAIDYGADAVFVGGQAYGLRSRAGNFSMEELQEGIDYAHARGAKVYVAANMVTHEGNEIGAGEWFRQLRDMGLDAVIVSDPALIVICSTEAPGLEIHLSTQASSTNYETFEFWKAMGLTRVVLAREVNMAELAEIRKRTDVEIEAFVHGAMCISYSGRCVLSNHMSHRDANRGGCSQSCRWKYDLYDMPFGGERRSLKGEIPEDYSMSSVDMCMIDHIPDLIENGVDSLKIEGRMKSIHYVSTVTNCYKAAVGAYMESPEAFYAIKEELIDELWKVAQRELATGFYYGIPTENEQLFGARRKIPQYKFVGEVVAFDSASMTATIRQRNVIMEGDRIECYGPGFRHFETVVKDLHDADGQKIDRAPNPMELLTISLPREVKPGDMIRACKEGLVNLYQKDGTSKTVRT

SEQ ID NO: 192 - protein, 357 aa, S. pyogenes
MRKLYSFLAGVLGVIVILTSLSFILQKKSGSGSQSDKLVIYNWGDYIDPALLKKFTKETGIEVQYETFDSNEAMYTKIKQGGTTYDIAVPSDYTIDKMIKENLLNKLDKSKLVGMDNIGKEFLGKSFDPQNDYSLPYFWGTVGIVYNDQLVDKAPMHWEDLWRPEYKNSIMLIDGAREMLGVGLTTFGYSVNSKNLEQLQAAERKLQQLTPNVKAIVADEMKGYMIQGDAAIGITFSGEASEMLDSNEHLHYIVPSEGSNLWFDNLVLPKTMKHEKEAYAFLNFINRPENAAQNAAYIGYATPNKKAKALLPDEIKNDPAFYPTDDIIKKLEVYDNLGSRWLGIYNDLYLQFKMYRK

SEQ ID NO: 193 - protein, 328 aa, S. pyogenes
MKHPIRKTLVTLGLLLTLCLPTPVAASSRSWKSWFIEQYFWLKRDKSYYSKQDDPSFQRYLDACREQSDKPYQLDTNLVNGPLVQENLYGMQVYSWNDNGKPDQKTIIYLAGGSYLNNPTTYHINMLKTLSTSLDAKIVLPIYPKAPRYTYNYTMPKLVNLYQHYYHKNQNVFLMGDSAGGGLALGLAHALHNESVPQPKQLVLLSPWLDVTMSHPEIPEYEDADPILSSWGLKRVGELWAYSADNTNHIYVSPKNGPITYLPPITLFTGTREIFYPDIRDYAAKLKAANHNITFITQEGMNHVYPIYPIEEAKTAQYQIIDAINKTP

SEQ ID NO: 194 - protein, 541 aa, S. pyogenes
MKKRKLLAVTLLSTILLNSAVPLVVADTSLRNSTSSTDQPTTADTDTDDESETPKKDKKSKETASQHDTQKDHKPSHTHPTPPSNDTKQTDQASSEATDKPNKDKNDTKQPDSSDQSTPSPKDQSSQKESQNKDGRPTPSPDQQKDQTPDKTPEKSADKTPEKGPEKATDKTPEPNRDAPKPIQPPLAAAPVFIPWRESDKDLSKLKPSSRSSAAYVRHWTGDSAYTHNLLSRRYGITAEQLDGFLNSLGIHYDKERLNGKRLLEWEKLTGLDVRAIVAIAMAESSLGTQGVAKEKGANMFGYGAFDFNPNNAKKYSDEVAIRHMVEDTIIANKNQTFERQDLKAKKWSLGQLDTLIDGGVYFTDTSGSGQRRADIMTKLDQWIDDHGSTPEIPEHLKITSGTQFSEVPVGYKRSQPQNVLTYKSETYSFGQCTWYAYNRVKELGYQVDRYMGNGGDWQRKPGFVTTHKPKVGYVVSFAPGQAGADATYGHVAVVEQIKEDGSILISESNVMGLGTISYRTFTAEQASLLTYVVGDKLPRP

SEQ ID NO: 195 - protein, 271 aa, S. pyogenes
MNLLGSRRVFSKKCRLVKFSMVALVSATMAVTTVTLENTALARQTQVSNDVVLNDGASKYLNEALAWTFNDSPNYYKTLGTSQITPALFPKAGDILYSKLDELGRTRTARGTLTYANVEGSYGVRQSFGKNQNPAGWTGNPNHVKYKIEWLNGLSYVGDFWNRSHLIADSLGGDALRVNAVTGTRTQNVGGRDQKGGMRYTEQRAQEWLEANRDGYLYYEAAPIYNADELIPRAVVVSMQSSDNTINEKVLVYNTANGYTINYHNGTPTQK

SEQ ID NO: 196 - protein, 265 aa, S. pyogenes
MTTMQKTISLLSLALLIGLLGTSGKAISVYAQDQHTDNVIAESTISQVSVEASMRGTEPYIDATVTTDQPVRQPTQATITLKDASDNTINSWVYTMAAQQRRFTAWFDLTGQKSGDYHVTVTVHTQEKAVTGQSGTVHFDQNKARKTPTNMQQKDTSKAMTNSVDVDTKAQTNQSANQEIDSTSNPFRSATNHRSTSLKRSTKNEKLTPTASNSQKNGSNKTKMLVDKEEVKPTSKRGFPWVLLGLVVSLAAGLFIAIQKVSRRK

SEQ ID NO: 197 - protein, 632 aa, S. pyogenes
MIQIGKLFAGRYRILKSIGRGGMADVYLANDLILDNEDVAIKVLRTNYQTDQVAVARFQREARAMAELNHPNIVAIRDIGEEDGQQFLVMEYVDGADLKRYIQNHAPLSNNEVVRIMEEVLSAMTLAHQKGIVHRDLKPQNILLTKEGVVKVTDFGIAVAFAETSLTQTNSMLGSVHYLSPEQARGSKATIQSDIYAMGIMLFEMLTGHIPYDGDSAVTIALQHFQKPLPSIIEENHNVPQALENVVIRATAKKLSDRYGSTFEMSRDLMTALSYNRSRERKIIFENVESTKPLPKVASGPTASVKLSPPTPTVLTQESRLDQTNQTDALQPPTKKKKSGRFLGTLFKILFSFFIVGVALFTYLILTKPTSVKVPNVAGTSLKVAKQELYDVGLKVGKIRQIESDTVAEGNVVRTDPKAGTAKRQGSSITLYVSIGNKGFDMENYKGLDYQEAMNSLIETYGVPKSKIKIERIVTNEYPENTVISQSPSAGDKFNPNGKSKITLSVAVSDTITMPMVTEYSYADAVNTLTALGIDASRIKAYVPSSSSATGFVPIHSPSSKAIVSGQSPYYGTSLSLSDKGEISLYLYPEETHSSSSSSSSTSSSNSSSINDSTAPGSNTELSPSETTSQTP

SEQ ID NO: 198 - protein, 1581 aa, S. pyogenes
MADELSTMSEPTITNHAQQQAQHLTNTELSSAESKSQDTSQITLKTNREKEQSQDLVSEPTTTELADTDAASMANTGSDATQKSASLPPVNTDVHDWVKTKGAWDKGYKGQGKVVAVIATGIDPAHQSMRISDVSTAKVKSKEDMLARQKAAGINYGSWINDKVVFAHNYVENSDNIKENQFEDFDEDWENFEFDAEAEPKAIKKHKIYRPQSTQAPKETVIKTEETDGSHDIDWTQTDDDTKYESHGMHVTGIVAGNSKEAAATGERFLGIAPEAQVMFMRVFANDIMGSAESLFIKAIEDAVALGADVINLSLGTANGAQLSGSKPLMEAIEKAKKAGVSVVVAAGNERVYGSDHDDPLATNPDYGLVGSPSTGRTPTSVAAINSKWVIQRLMTVKELENRADLNHGKAIYSESVDFKDIKDSLGYDKSHQFAYVKESTDAGYNAQDVKGKIALIERDPNKTYDEMIALAKKHGALGVLIFNNKPGQSNRSMRLTANGMGIPSAFISHEFGKAMSQLNGNGTGSLEFDSVVSKAPSQKGNEMNHFSNWGLTSDGYLKPDITAPGGDIYSTYNDNHYGSQTGTAMASPQIAGASLLVKQYLEKTQPNLPKEKIADIVKNLLMSNAQIHVNPETKTTTSPRQQGAGLLNIDGAVTSGLYVTGKDNYGSISLGNITDTMTFDVTVHNLSNKDKTLRYDTELLTDHVDPQKGRFTLTSHSLKTYQGGEVTVPANGKVTVRVTMDVSQFTKELTKQMPNGYYLEGFVRFRDSQDDQLNRVNIPFVGFKGQFENLAVAEESIYRLKSQGKTGFYFDESGPKDDIYVGKHFTGLVTLGSETNVSTKTISDNGLHTLGTFKNADGKFILEKNAQGNPVLAISPNGDNNQDFAAFKGVFLRKYQGLKASVYHASDKEHKNPLWVSPESFKGDKNFNSDIRFAKSTTLLGTAFSGKSLTGAELPDGHYHYVVSYYPDVVGAKRQEMTFDMILDRQKPVLSQATFDPETNRFKPEPLKDRGLAGVRKDSVFYLERKDNKPYTVTINDSYKYVSVEDNKTFVERQADGSFILPLDKAKLGDFYYMVEDFAGNVAIAKLGDHLPQTLGKTPIKLKLTDGNYQTKETLKDNLEMTQSDTGLVTNQAQLAVVHRNQPQSQLTKMNQDFFISPNEDGNKDFVAFKGLKNNVYNDLTVNVYAKDDHQKQTPIWSSQAGASVSAIESTAWYGITARGSKVMPGDYQYVVTYRDEHGKEHQKQYTISVNDKKPMITQGRFDTINGVDHFTPDKTKALDSSGIVREEVFYLAKKNGRKFDVTEGKDGITVSDNKVYIPKNPDGSYTISKRDGVTLSDYYYLVEDRAGNVSFATLRDLKAVGKDKAVVNFGLDLPVPEDKQIVNFTYLVRDADGKPIENLEYYNNSGNSLILPYGKYTVELLTYDTNAAKLESDKIVSFTLSADNNFQQVTFKITMLATSQITAHFDHLLPEGSRVSLKTAQDQLIPLEQSLYVPKAYGKTVQEGTYEVVVSLPKGYRIEGNTKVNTLPNEVHELSLRLVKVGDASDSTGDHKVMSKNNSQALTASATPTKSTTSATAKA
